United States Patent Application Publication US 2026/0137732 A1 - sequence listing, part 9

SEQ ID NO: 6 - DNA, 2835102 bp, Akkermansia muciniphila (residues 1,417,552-2,835,102 of 2,835,102)
  source 1..2835102: mol_type = genomic DNA
cggagttccagaagccggccatggatttgctgaatgcctacctgtccgcctgctccgaccctgattttgtcgaaccttcctcttccaaaaacaacaatggagcagccggaagagccggcgcccgtattgcggaacaatccgtccttaatacggaagtgggggaggccctgggcatcagtagcatgtcttccaaggctttcccggattccatgaaaaaccgggatgaaatttttgacaagctgtttttcaccggataccggaagacccgcaaccttcccgccctcaggcaggcgtggaacaagagaatttccatggaagtggctctgggaaaaatcagccatgccatttcctccggcaagaaatccggcatgcagggccgcatcgccaatgcgtccgaagacgaatttgatgagcagggagccgccgttctggatcgtttgcgctggcgctgcgaactggattgcttcgacttgggagaccaagcaaacgccacgaggaatatgatgacgctgatccggacgacggtggatcccgtgcgccgggaacaaggtatccgcaccctccgggataaactggttcagagcatgaagagcatgatggattctccggaagaagaaagcatggctgacggttcctcttcatcctctgcaccgcgtcctgccatgcgttcctccaaaaagaaggctccctccaccacgattacgaccagccgtgaaatggatgatcccggagccatcggaacggatgtgccgaagcctcccaaaccggccccaacccggagtgacgatttttttgaagacatctgactttcttcagacaaaagatgttgcccgaacggcggtttccctgttcatggaatgcgcagagcatccttgacgtccggagccgccgttttatacattaagggcatgtatcagccatttcaatttttcatgcccgcgcaaatcttttttggcgcgggttctttggacaatcttggttccgccccccttcccggcaccaaggccctgatcgtcatcggcgggtcgtccgtcaaacgcctcgggtatctggaccgcgtacaggctcttctgaaaaaacagggagtggaaagcgttgtttttgataaagtgcagcccaaccccgtggtggagcacgtaatggaagcctcctccctggccagggaaacgggctgtgatttcgtcatcggcctgggcgggggtagcagcatggattccgccaagagcatcgctgtgatggcggccaatccaggaacctactgggattacatccagggaggttccggcaaggggcttcccattccctgcaaacctcttcccatcgtctgcatcaccactacggcgggaaccggaacggaggcggatccgtggaccgtcatcacgaaagaggacacgcaggagaagatcggtttcggtttcaggggtactttccccaccatgtctatcgtagatccggagttgatgctttccgtacctcccaaattaacggcataccaggggtttgacgctttgttccatgccgtggaaggatatatggctacaatcgcctcccccatgggggacatgttcgcgctccaggccattgaatacattgccaaatatcttccgcgcgccgtgaataacggggatgacctggaagcgcgcgcctatgtggcgctggccaatacctattccgggtttgtggaaaccatttcctgctgtacgtcggaacattccattgaacatgccctcagcgccttccatccttccctgccccatggcgcggggctaattatgatttcctgggcctaccatgaagcctatgctccctcctgcccggaacgttacgcaagagttgccgcagccatgggacaggaagcctccgtggacggtttcctgaacggcttgaacagcctgaaggaagcctgcggcgtagacaagctgaagatgtccgaattcggcattacaccggatttatttgacgaatacgccaaaacggctttttccaccatgggcaatctgtttgagctggaccgttgcaagttgactccggcggacgtggtcagcatcctggagaaatcctattcctaggaacaaacttccggggctatcgcccgcagggaatatccctgcgggcgcgagagatttagctcagccgcggcattaccaagacgaacgcggcgcgtatgattccgatttcctctacacttgtggaacagctgaactatttcaaagcagaggtttttcctgcaggagatctgatgagccaatggttcctctttgataatagccttgcgtgtggaatctccgggtattaagccttcagcccccctttatcagatggtggaaatccattgtcatttgtctctcactcgttgccgcatagtcgttgataatttgttgatagctcacttgtccaaaaaagcagcaatagaatcctgctcagacttacagggaaacgggaattccatattggcttaacatgttgcctgagatttcaaaaaaggtagaaccagatgcaagcctttcggatttctccttaatcatttctcccataaaataaatgaaataagaatttgccctactcgtaagtaaagagtagggctgtatgagctgtcagaattctaacagagcaattttgaagtcctagttgcgtgattcgtctgatactgcgttcaacataccgcgaccctccgtctctgcaggtgcgtaccaatcaatatctccctcccaaaatgagggttattcaagggtttccccttggctcttttgcaggaaatctgcatttcctcctcatgtcagcatgacttacgagaggtcaaaaccgccgtttgtgatgaaatctcggagtattttgtccagtttcatggccactttgggtgggggtaatggagtgtgagacccggtctcgaagtaggctttggcctttttcttatccgctgtagctttcaatgcatcaaagcggccaaaatcgttgatgttcccctcagtcacccgatgagacatcatgccgcgcaacaatgtttcatccagaccaaacacggcggcaaagcggtgtatgcggtcgtcctgggcttttgccatgtactcggtcacatagtcacggaaagtcttgccctctacaggaagagtctgaatatcgtctccgtcggctaccttgataatgccgacatagggtatcttttgcattgtgaataccccgttacagcgatttcatcacatcaagcaagtgctgatagctgtcaacatcgtgatactttacgttctccgtggaaatctcattaaagagctttctcgcacaggagattttcgctttttcaatcggcttcaaactcaaactctccattgtgcccttggtttcggcaacaaagaagatgtgctttaccgcaccctcgttgaacgcaatcgcccagtcgggagagtagttaccaacgggagtaggaatatggaagcctctcggcagcttggcgtaaacgcaaacctcgtcagcactatccaagtcctctgcgaagcggcgttctacgctcttttctgcgtagccgtcagtaaacacataatctttaatatgcttggatgccttaaacgctttgtcgatacttgtcgaactcttttcagccgtgaagatagtgctgtcatattcgccctcgatttggtcgtaggtgatatgctcaactatcattgttgctttctgctcgttgataagacgaacgactttggtgataaattcttcggggttcgccttgtacatagcaaaattaaccggagagatacctttgataatcgcaacgacggtcttacgggtcagaacggttccttccgcaatcttgccaacaaggtcatacttgatttggttgacttcactacgtttgagagtcgttgtgcgagtctttgcagacttgaacgcttcgccacgctccagagcattggcgtccatttcatcggtctgctcgcccttggagacggtataagtaagctcggaaacaaacagctcattgttgatatgacggatagccttttcaatcagttcggcgctgtcaaaggagacagcataagcgtacttgtgattgatacgcttccaaagctcctggaactccttcttgtagaagttcttgttaagctcgttactttcaatcttggtctgcttgccgttttcaaccatacgagcaagagcagattcatcgaatacagcctgcacgagagtatgtacgccctctgccataggagcaaggtttgctggcataggtgcgagcgtacccatttccaaatccatgcggtacttgtccgtcacctttctgtccatatccacatagccgttctgaatcagatagaactcgatgttatttgcggttttttcgtcaatagcagtaggcttgccgtccaccttgacgaacttgcccttgaagtaatcgctggtagcggcggtcggacggtcgtagagaaccttcttgatgtcagattgcaggtctgcaacaaagcccttgtagctttcgcttgcaataacggtcagcttattgatgttgtggatggtctcaccgagcgcttccatatccattctgttaccggcttggttgacgcaaaggcgaagaccacgaccaacctcctggcgtttctgcgtggagctgtcgctgtgcttcagcgtacagatttggaatacgttcgggttatcccaaccttcacgaagtgcagagtgggagaaaataaatcttgtaggctcatcgaaggagagcaagcgttccttgtttttcaagataagctcgtaagcggaaatatcatcggagaactctgttcctcgtttgagagcagagttgatgctgcgtccggtctttttgtcaatactgaaatagcccttgtgggtatcagcggtttcaatctcacgcagatacttctgataaggggtatcaaacatcgtcaaatactcgttgagaatagcggtgtattcttcctcgaagatacgaccgtattcaccgagaacctcattgccatcctcgtcgtactgacgatacttggcaacctcgtcgataaagaacagagacagcgttttgatgcccatttcaaagagcttttcttctttctcaaagtgagattggatagtctctctgatttggatacgacgcatatcctgctcaacaacatcaccgataacctcgccctggtggattacaagacctcctgtaaaggtaactgttccacgaacagggtcaatgtcggagataacatagccgttcttatactgctccatttgattggacttatagaacaggtcgtcaccaacggcaaaggtgaacagctttcttgcgtgaccggcgttttgagcaacctcgatttcaagttttgccataggcggcttactcggagacaacacgatgttttcaagatagagatattggcttgtgccggtaaggttcttaacctcaaaacccttaacctcaatcttcttaacgagcttcttgttgaacgcatccaaagcatccagaacatacacaaggttatgctccttggcgtgagtagcagagtagttcaagctgaacaaaggattgaagtttttgagtgctttttgcgtaacctcgccacccattttctgcggctcgtccaagatgatgataggtctatttgctttgataacgtcgataggacggcgagagccgaactcatcacgcttggaatagataatacgggcttccttgcttttgccgtcctctttcaaagacgaagcgaaagcctgtgtattgataatcattacgttgataccggagctggacgagaagttgtcaagctcgttaaggttggagctgttgtagatgaagaaacgagccttcttgccgtactgctccataaaatggtctgcggtaatctggaaggtcttgtttacaccctcacggatagcgatgctcggaacgacaacaatgaacttactccatccgtaacgcttgttcagctcaaacatcgtcttgatgtaaacataggtcttacccgtaccggtctccatttcaatatcaagggagcaacgtccaacatctgcaatgagcttgtcggaaaccttgatattgttttcgctctgaatggcacggatattgtcaagaagctgtgcaccggtcagctcgatagccttgtttttataaccggtgtcgctttcaagttcaatgtcacccaggctgagctggtcgtccatcggcacgagagtcatctgttttccttcgttgaagatagaaccatcgaatccggtataagtcttttgttttccaaggtctcgtatatatgtaatcttgtcgtagtgcggttgtccgttgaatacacgaacaatcgcatctacagcatcggtctgatactgctgtatcttaaagttaatcttcatttgcggttttcctcactttctcggattttggctgtacttactcattacagcactttccgtactgtggaggggctgatagaagcaaagatttggtcgaagttggtgagcacagaatcacttgccataccgctatcacggaatacagcatagtaaggctgctcctttacaatcgacttaacaacatcatcggaaatattctcgtcgaagcaagcgtacaggaagccctcggctacgttaaataccttgcagccattgatagtggtttcttcaatcttggaggagaggagcacaccaaggtcaagcataacctggaacagcaaatcttcgggagttctatcttccttgatgttgttggcatagttatcgaacaaagtctgctcaacctcatcgggcttgtagaatacttccttcatatttgatgtatcgcacttcaaaacacggaagccaatgtcaaggtcgattgtggttaatggactttcctccttgattctttgtcctgctctacggatacgctccttaccaatctcgcaaatggttttatagccagccttaaatgcctcggaatctttactggtttcttctgggagctgaaccataatgaaccttctattgccgttatccttggcgtttagctgcataacggagtgcgccattgtaccggagccagagaagaagtccaaaacatagtcctccgaatccgtgtttgtacccatttcaagtgccctcatcaagagttctacaggtttaggatagtcaaaaatcttacctcccaatatttcttttacaagcaaagttcctttctcggtgttcgtatctttatcccaccaaacggaacgtgccatcattcttccttctctatatttttcaactatcataaaactaccgtttttcatcggcttagccttaatgttgatgttgaggttttcctgtgatttaggtttcccccatctccaaacagtattcacgccctgcgactctaacggatataattcaatccatccttcgtgagcttccaatgagatagtatgtaaaccgtgttcgtctttttcagtaggatggatgtagaagggatagtaaaggttcggtctgttttctttattaaacttaatattacgattccttaattctctcagctcaaagccgccaagcttatcgaacatcttgaagttattttcagaatcttcgatgagatttattgttgccagcggagacttcctgtacacaaacagataatcgtgcatacgagcaacaccaccatagtctcgacctcttggattaccaacgacggtgatttgaccgacaaaattaacagctccaaaaatttcatcacaaacttttttcaggtttacagcttcgttatcatctaagctgataaaaattacgccctgttcggaaagtaggtcttttgctaatttcagccttgggaaaatcatattaagccagtctgtatggaatcgaccattactttctgtgttttcgaccaacctatttccgtcgccgtcatatacggagttttgagcattaaatttatcaatacccatagcaaaatcgtcattgtaaaccaagtcgcttccggtgttatacggagggtcaatgtaaatcatcttgattttgccgagataagtttcctgcaggagctttaagacttcaaggttatcgccctcgatatagaggttttctgtagtgtcaaaatccacactttcctcacggcaggggcggagggttttggaaataggagcgtttgcgagcaggacagatttcttcttgtccggccaggtaaactgatagcgttcctccttgccctcaacgaccttgcaggagatttcctgcatcagcacgtccttatcaatcgcacgaacgacctcgccgttctcgtctatagtctcggttacggcattggggaacatagccgccaacgctttgaaattctcatcggctttgttcgccgtttgcatcttcaacttatccatttgtttcttcctccgtttttattttcatcatcatgttgtaatgttctatttggttcgacttgtcaaacaagtccctaaaaaccttcaagtggttctcggcactataaattgcggttgttgccgaaaagtcatcaaatgcagagtgggaaccagcgtgcatccaagaaataagggactttaaaatctgtctttctccatctggaaattgaagatggaactgactaatatccttaccgcccaggaaccgaaaatagtattctacaattcttctcattgcatttgcgagcgtcaaggtgttgcactccgatgggttttcgttggcttgaattacttcatcccacaacatctcataggtggaactaaccgggttctctttatacgaggcaattttagatgtatttccggtcttcgttatcatccaatatccagtttctttctttactaatcctgccttgtaagaaacctctttgaaaaagtacagattgtgtgaaaggacaaatagctgtttaatggaacctttgccactatatatgtccttgaacaaatctcttatcaaggtgcttacaagaaacaggacatcattatctaagctggataccgggtcgtcgattatcaaaatcttgtcgtactcgtgtccagactcgtccgtgtttcctctcagagtgtggatgaagtacaggaacgtaacaaagttcttttctccctcactcaacgattcaaatgcaggctcgccatttgctcgcacaaattgataggttttactttcatcatcgaccttcaacttgaagctattgaacccatagttttcaagcatggcgtttataccattagctgttggaataatgcttgtcaacatttcctcggctgttcttagctccgtggttttggaaaatatcgttttccttgcattatccaaggcagtttgagcttcggagatatagcttttgatttcatccttgcgtgtggaatatgtagcaatatcgacagctaactgggtaacgatatatttccacaccttagaggtcagcttttctttttcctcttttatgttgtcaattcgagcgttgtgttctcggattgattggttagctgtttcgattatagcttcgacattttcggaaatctgttgaagagtttccaaagtaacaatactgtttggactggtcgttttctcggataatttctttttattgatttctattgtagttttaagtgtagctaattccttttctaaagccttgatgtccagaaaactgttttttgagtcaacaagagtttgaattgtagctatcagccgttccgctgccgtgccatactttgatgcaagagaagtaatcttacccatattcctcttgtatgtatcatcaaaatattcttcaacctgcttactgaaatcatctggaagcagttgttgacagaagggacacacgccatcactcacatctaaatactgtttgccttggctgaaccacgcactgtttccgagcttttgtatgagttcggagatggcaacattgtctttaccaacaacaacagttgacagaatctcatctgattcaaaagagagcatttccgtgaaggatggttgtgtaatagctgtggctttatctaccgatgcaccaaacaattctgaggattgtgttgctaatagggttttatcaaacaattctgatttattttgttcgctttcagaaatcaatcggtccttaaatttgtctttgcttccaagcacaccggaaattgcctttaacagaggactatcttcacggtcaagtttttgctttatctcccaaaacttaaccgcataactttcctcgtggttctttagttgttttttgtagccgatactggtatccgtcccatcaatttctttcgtcttggtatctcttgttttttcaagttctgcaatctcatccgtgagttgtttaatcagctcctttgtgccgattggtccttctcctaaagtaaagataccggggacactttcgctgaaattaccctcaacgaaatctctattgtaaacagcacattttataggcgagccatcccaagtaatttgacaggaactatacttttcatcggttggagttgcaataaagcggctgattgtcgttttaccacttccgttcaaaccgaaaagaaaattaacctttaacggttcaatgagttgaccgttatcgtcatcataggatgcaactttatttagaagcagggttttaatcataaaatcgttccatcctttcgtcagttttctaattcattcagccttttcttcatagcctttacttgcgaggcaagctgaaacttcttgttcggctgcttctcgttacgagcttgcttttcgagcttttctatatcttttttgagcttttcttttaggtcgtcggtcgcaatctgctcgtcaagagtattaccttgttcaagctccacaccaccgacctggatgatgaagttttcccaaacagcatccatattcagaccttcaaggtcaagggtcagctcgtcctccaacatccaatcgtcacggacacgcagattgatgttatcaatcatcttaggcatacccggcatttgaggcatagcggtataaagcggagcttgctgaacggcaggagcttcggtttccacagactcttcctttttctcgccaggatagtgaataagtgaatcatcgacatcaaagaagttcagttttccctttacagggaacgccttaattttcttaacatcctccagatgccattcatagatgtcatctgcggcattgtatgtagtatcgacgagattgacgacacaaatggcataaccggagagcatacccggaactttcggattcgcactgctgcaaaccaaaagatcgccacaatgctttgtgtcccacgaccgatattcgatggttttagtcccacgcagtatctgagttgcgtaaggatttttgattgatatagccttcataatctactccagtccgacatggcatttctgcaatgtcagttcatttatatattcaaaattctattccattaaaattcgccttgcttctctgtacttttcaagtctttgcaaatcctttaactcaaccttatcaagacgtttataattactgttgtcctgtaggtcagcaagttttacagctttggcgatagagtttatctttattcgtttgatgtagtccagatatggctcgctactatcgtgagtcaatatttcaagagcttcaagaacttcatcggggaagccgttttctcgcaaattgtcgatggtcaaatcagaatcctcaactgaagtcgctgcccttgtcaatccatgtagaaaagaggtgtttataggagatgaagtaacctacattgctgcggatatagtcaaccgtctccgcgtcatcttctgtaacatggggcaaatcatcgtctgtccagtcgttctctttcaggaacttgacttccttatcggaaaggaacttgtagaagatgaagccgagaatgtagtccttgtattcattggcttcaattttggagcgcattttgttggcagactcccaaatcttcgatgcaagctgttgtttgttcatagacagggttaaacagtatacacatatcttcccaaaagtccagcgacaggcccatcagcaattccattttttccgcttgcagcgtggtctttcctcattcgttctgcgtcaaggaagcatcgagcctcgttcccaccgaattgacagcgtttaaaccacccctgaaaaacagcgcgactgccgggtttccatgttttttctttaccgggcggccagatatcccaggccaatggcaaggagccccccggcaaagctgatgagagtgtaaaggaagaaggcggagaagttcccttccttcaacaacaggaaggattcattcatcagcgtggaaaaggtggtgaaaccgccgcacaagcctgcggtaagaaagagccgcgtttccgtatgcagcaggctccggttgaacaaaccgtagaggaagcccaggataaaacatcccagcaggttgactgccgccgtgccccaggggaacgaacttgccgaattgacctggacgaaccgggccagcaggaaacgcaatacaccgcccgcaaagcttcccaggcccactatcatcagcattttcatcgtatagcggctttttctatgttttaatggggaataaagtttcggagcagctgccgaaatccgccgggaaagactggctgcggcttcttgtccatgaaagggttgctggctgcgttcccgaaaactagtttggaaacgttcgtgtcgcctggtgaagccctttaaccggaaacaagacttctgcggaagctgccggcctgtatgccggcagaacccatttcctttaagcgtgcacggataaaataccctgttttttccatatcgccagcctttttgttcttgattgcagggtaaaaccgtatttccttttttccatgtcccagccccttctcgttaccggaaccatcggaattgataccatccttactcccggcggcagggcggacggcgttctgggaggttccgtttcctttgcggccgtggccgcccttttgtttgccgaccgtgtggatgccgtcagcatcatcggggaggatttccccgcccattatgaagcggcccttgaggccaaaggagtgtgcatgaacggggtagaacgcaagaaggggccttctttctcctggaccggggaatattttgacaatatgaacaagcggaggaccgtttgcgccaatgattccgtgatgctggaatgggatgtgcacgttccggagcctttgaggaaccatccggttctggtttgctgctgcatggttccggcccagcagctcaagtgcatggaacaatgcccaaacgcggcgctggtgctttccgattccatggacaagtggctgcgccgccagccggaattgctggatgccgtgatcagccgttcccatatcaccatgatgaatgaggatgaggcgaaggaatatgcccaggcgtccaccgtcatggaagccggggaattcctgctttccaaaggcgccgcgtacgcagtggtgaaacagggggaatacggagccacgctcttaggccgggatgccggcgggaatctccggatgttccgttgtcccgcctatcctctgaaaacgctggtggaccccaccggcgcgggggatacgttcctgggggctctggccggctatttgtccaccctgcctcccggccttcctccgtttgaggaagtgaagaaggggattgtgtacggaacggtggcggcctccttcacctgcgagtccttttcggcagatgctcttctttccatgaccaaagagacctttcgccgccgtcttgaggagtacgcggagatgtgccgcctgcctgatatccggctcttttccgcaagtgactgttaagacgggatcagatctcctgaaaaggaggaaataccgcccttgatttcgttttccggtctccgtttttgcgggatgtccggaatgttcaggtaaagaaagcccggatgcggaacatgaaaaaccccggcgtggcatgcacagccggggttcccgtaaaaacaggggatgcagtcggcgggatcaagcatcctgaaggccgaatttaagctcggcttccgaaaccacctgtccgttcaccaggcagcgtgccgtcgcctggccgatgtttccgcgcatcttggtcagctccgcttcaatgatgagcgtatcgccgggaaccacgacgcggcggaattttaccttgtccgcactcatgaagtaaccgagcttgctggcattgccgggctggcgcagcatgacgatggaggccacctgggccatggcttccacctggagaacgcccggcatgaccggatggcccgggaagtggccctggaaaaagagttcgttcatggtcaggttcttcagaccccggcacttggtttctccttcaaaaccgataatgcggtccaccatcaggaagggatagcggtgcggcagaaggctcattacttcgttgatgtccagcacggcgtctccgtacggcacgttgacgggattgggagccatctgctggttgcggtggtgttccttcttgagcttggccgtgagttcagtattcgggccgtggcccggcttgatggcgatgacgtggcccagaatgggcttgccgcacagggtcaggtctccaataaggtccatggccttgtggcgggcgaactcattgatgaaacgcatgggttccttgctcatgagctcctcgccgcggatgaccacggcgttttccaggctgccgcccttgatgaggcccttttccagcaggggcttgatgtcttcgtagaacgtaaaggtgcgggccggggccagttccttttcatacgtttccggcgtgatgaccgcgtcaaagtactgggtgatgcggttttccggtcccacgcaggtgacggaaacgcggaattgcttggaggggagaatggtcaggatggaaccgcccttggtttcaatggtgacggcctcgcgcacttccagatagcggcgcggcacatccagttccacgatgccggcgcgcttgatcagttctacgtagggggccgaggagccgtccccgatgggaggttcgttggcgtccatttcaatgacggcgttgtcaatgcccatgcccgtgagggcggagaggatgtgttccacggtatgcaccttgacggaaccttcagccaggctggtggcgcgttccacagtctgcaccttttccacgtccgcgctgatgaaaggctggtccggaatgtccacccggcggaatttaatgccgaagtcggcgggagccggtttcagggtcagggtaacgggctgccccgtatgcaaagaggtaccggccagggaggccggagagccgacagttctttggtttccacatgccatgcggggatgctagtgaatgagcttccgtttggaaagcacgaaatcacggattttcctttaaattcggggaagaggcggtattccggcgtgtcattccggaaagaagtggataaagggcgcttgaaaaaacgccgctcacccggtagtgatgttccatgcacatcacggcaggcctccgcatttcccgtgcatttattctcggcgccgggctgggtacccgcctgcgccctctcaccggcattctgcccaagccgctgattccctttttccatgaaccccttattctgcattccatgcgccgatgttacgattgcggcatacgggagttcatcatcaacacccaccatctggcggcggcatgggacaaggtgttccctgaacatttatggaacggctgccctgtccatttcagccatgaacccttgctgctggattccggcggcggcgtcaaaaagatagagcccctggcttccccggaagaaccgctgctggtggtgaacggagacatggcggccacatttgacctgggccgccttctggaggagcatttgagccgccgccctcccgtgacgctggccctccgcacctccggagacaagaaaaacgtgggatttgacttttcttccggcctggtgacggatatgaggcacgccctgggccgcgactccggctcctgccaatttaccggcgcgtactgcatggagccggaagtattcgggcgcatcccttccggggaggccgtttccattattcccctgtttctggattacatccgggaagggcgcctgcgcggcattctggcggacgacgggttgtggatggacatgggaacgccggaggcctaccttcaagcccatctggatttcccctctcctgttccgcgcatccacccccgggcccgggtgtccccccgcgcctttacggacagtaattgcgtgataggtcccggcgcaacggtagaggaaggctgccgcctgcaaggctgcgttgtctggccgggcgtacgcgtgccttcaggcacctgcgcggaacgccggattttctactgttccctcaacggttattgaccatgcttttgctgcgccttcttcccctgatattgtgcttttccggcctggttcacgcggaacaccgcgttttcaccaggaaggacggctttttgtccatgcgggacaagctgaacgtgtattttttccgttctgatacgcaccgtctgctggtgagggacgaaggaagcgtcaaaacgccccggcacggttccctggacaaggccatgaggaaaagcccctgcgtggccggcgtcaacggagggtttttcagtgcggacgcggagggaacgcccctgggcctggtcattcaggacggcaaacggctttctccgctggctacgggatccttcgccgtttccggagtcgtttatgaaggaggcagaagcggattgaccctggttcgcagttccgtgctgaaacgcatgaaaaagcttccggccatgcaggcagccatccagggagggccctttctggtggagaacggctccgccgtaaaagggcttaacgcgcagaagtccacctaccgcactttcattgccacggacggaggaaaaaggtggtgcatcggcgtttcctcctccctgactctgaaggaactggcagcctggctggcgactcccggagcattggggaatttccgggtggaaacggccctgaatctggacggcggctcgtcttccgccttctggtgccatgaaacaggcatttcctaccctgcgttcaaacaggtcaggaattatctgggcgtagcccccgtggaacgccggtaaacgccgtcctccacggggccgtgaacgcgtttccctgcgcctatcctgcgcagcagcagaaccgcgaacgccaggaaacaaaccagaacagcccagtcgcccagcatggcgtacagggttatttccgtacagcccacaggcaatgtggcagccatcacccctctggtaaacggagaaccggaggaatcccgcaaatccgcaataaccgcgccattgggggccagggccacgcttacgccggtattggcggcacgaaccatggaacggcgcagttcaatacagcggaacgccgcattgcgccaatgctgttcattggcgcaggaacggttgaaccacccgtcattggtcacgttcaccattaactggggttcctgccggacgaagcggcgcacccagcttcccaccacatcctcaaagcagaccagcggaataacgcccaccgtagaggagcttccggggcggataggcacgggaacggggctggaggaacgcccgggcgtataattcaggcccatggctgttccggcggaagcctcaaaggctttttccagaaacgggaatgtttcccgcatagggatgtattcaccgaagggaaccagcatggccttggcgtgcggacgggctgtagaataatccccctcaaagacggtaaggcagttgtaagcccgcgccacacgcccctcatcagacaggtaaatatcatccgtgcccgtcagcaggataaaattgcatatcccgttccggagggcctggacgtaatcctcttccgcgctcagaaagttgacattgtcctgattggggaagcgttcccctgtggaatcacggtaaaacgtggaaatggggaaggaactttccggccagatgacccatgccggcatatccagggaggcttccgcgccgtttttgaccgcctgttccagcgcgcggttttgaagatccagcattccctgttccgtcatgtccagcaaagcccggtaaatgttcctccggttggcagggtcccatttttccttctggctcagattcagctgcacggccatgacgggaacggtgaatctgccgtctcccgtggcttctgcagactgggcggagtaacgggccgtccagaccacgccaatgacaaacatggttaaaagaaccgccaccagtatgaaaaaatcccagggaacagtacgcctgccttcatggataatcatggttccggcccggcggcaaacgcgccagagccagacggaaaaaacggccggaataaaagccagcgccgttactccaaggtattccgcccactgggccagaggattgccgtaaagggccacgcccagattgttccagccgaagcccggtatcagccagccccgcccccattccagacatacccataaagcggcgcccgccagagcggcggaggcgctgggcagtatgtcgcccagggcccaggttttccaggcggcccggcgttcctttgccttcagcctcgcatcgggcagcggccgggcgtccggtcggaagaacactcccatgaccagagcccagaggccgggaaacaggcctccgtaaaaaatcatcaggggaatatagcccagcgtgctgacttcattgacccaccagaaggaaatgccgtaaaatactaccccaaacatccagccatacagggcgtatgccagcattccccttttcccctcccgcctgcggccgtaccacagggctgtcagcagaggcaggaaccctatccatacgcacccgccccagtccaccgggataaaggcgcaggccatcagaattccggaaaaagcggccagcagcagccctgcccacacgggcaggagacgagggagggaagcaggtgggatattcatcgtgaaaagccttttattccgggaacgggaatgccaccattgtcccccatgctgactcattcctgcaacaaaaaagattgcaaaatttactcaaatgcggaaatagtgggtgcagttcatacaacccatcatacacaatggcagatatcgacgaaaaaacacctctaaacgtccccggcaaattttacgtggacagttcctgcattgactgcgacctttgccgcgaaacggctccggaaaactttggacgggatgacgatgaaggagtatcctatgtcaagaagcagccggacaacgacgaagagctgagcgcctgtgaggaagccctggaaggctgccccgtggaagcgattggcgacgacggcgaataatatttctccatatattattttaaccgcccggggctgttggcattcaacgctccgggcttttattttcccccatgtcctccccctggtttccctacacgccggacagagaccgtccggatccccacgcctcccccgtccggtatgattatctttcccgtgacgagcaggaggtgaggcaggcgctggctgactggttccagatatcccccgccaccagtgaaacacgtaacctccatacggcggaatccctgctgggggatattctgtccaggcttcccctggacggcgacgggatggatcccgaattgctcagggaaggatggctgaaagctgcggggccattcctgggccagcaatccaaccttctttccattgtcaagggagtggccaccatccaggtgcttcaaccggccatgcgctaccatctccagcagtggcagggagccctgctgggaaaactgaaggaccagttcggcaaggacgccgttcattccatccgcatacggataggataatcttacactctgaggaatgcccccttttgccggtttccgcgaaagattatttattatccacgtgtaatatttgccatgcgattatccttttccgcgcctttgctggcttccggcctgatgctttgttttacctcctcccatggagactgggcatccccgcaccctctccagcaggaaaaagccgctccggtcccactgattcccttcccgtcccaggtggactggaaaacgggaacatgccctaaaaaggctcccgtttccgtgaaaaaaaacgcgtccctgtccaagacgctgggcaaggaagggtatgaactgcggatccgccccaacggcattctgattacggccgctgacgatgcgggtgttttttatgcccgcagaacgctggaccagctgggagctaggggagattacccatgctgcgacatcaaggacagccctgcgttcgccatccggtgcttcatgcatgacgcaggccgccatttccggcctgttgaaacactcaaggcggatattgatgaaatggcccggctgaaaataaacgcttttcactggcatctgacggattaccccgcatggcgcatccagtgcaaaaagtaccctgttttgaatgatccttccaagaggattcagggacgggacgttaacggcacctactcctacgaccagatacgggacttattccgctacgccagggagcgccatgtccagattattccggaaatcgatatgcccgggcacagcacctattttaaaaactgctttggcttcccgatgcatgatcccagaggcatcaacattctggaagaactgctggaagaattttgcagggaaattccggcggaaatgtctccctaccttcatataggagcggatgaaatccgcattcccaacggaaaacagtttgcggaccggatggcggccaaggtcaaatccctgggacggcagcccatccaatgggcgggcaacaatgacctgcctgtgtccggagacagttatgcccagctgtggaatgatgaaaattccgtaggtctgccggatccagccaggcagaagaatccctacttcgactccacggcaggatacgtcaattcctttgaccccggcattctggtgcgcaggaatttcttccgccagccctgcggaacagccaggggaaacaaccattccctgggcgtcatccagtgtctatggccggatacccgggtggagaacaaaaaaaacattcctgtccagagcccccagtggcctgccatgttcgccatggcggaacgcagttggaaaggaattccagaggatggttcccgttttgccggcagtctgccggaaaagaacacggaggcttatcaggccttctctctgtttgaaaaacgcatggaagccctggccggaagcaggcctttcccttactggagggattctttcgtggaatggacggtgttcggccccgttccgcaggacaggcaggaagaagtaagaaataacctgctggcgggcaaatctcccgcaggactgtctcccgtccagacgcgcggaggcaatttgtatttccgaacccgtgcgggtgcggaaggcctgtttcccaagacaaaaccggggaatacggtctgggcggagacgacgtttcactcacccgtggagggcaccatgcacgctatggtggggtttgacgctccggcccgttccacacggcgctgttccggagtaccggctgccggggaatggtcccagtgcggcaccagaatatgggtaaacggcaaggaaatgaaaaatccccaaacttacaaactggcaggccagcggcgttacgaaaagcatacatggaattcgcccgctaatgaaataccctttgacaacgaggaattctggtgggcccggcctcctgttccctttcaagtgaaggccggggaaaacaggatcctgatagaacaaccgtacacaggagaattccagtcgtggggagtcagcttcattccggtgaaaaaagcgggagaccgctggattgccgacccaagctattatgccaaacccaggagagggaaacaggatgacgtctctccggtgccataaaagtaaacatggaacactcccggcggagctttccgtccgttgttccaaaggtcattttcccccgctcatcaggacgagggaacgggggaaacagcgtttgaggaatacataaacgctccgcgccatcatgtaaaccgcgggaaccaggcaccaccacgcccaggcaggccatggggagggaaaacagctctctacgcccatcagggctatcagaacaaaaatatgggaacaatacacgaaaaagctgccggacgcccaccgggccagcttttccgaccagccggggctgacggcttttacaataattccgaagctgaggaaggccagaacaatcaatccggaaaaagagccgtccgcaatcaggaaagagtccgtacagcttacccagacaagacccacggaggctaaaagaatggaaccatgcacggcaaggggcatgttgccccagcggttcagacagcccggtgcggcggacgccagcataacgccgagcgcaaaatccccaaacatgtacggactgggccatgccagggagtcgtcccaccggtgcagaaacaggcaaaacaggccaaaggcgtaaagagctggacggaaacgggagagcaaaaacgcagccagggtaaacatcatcaagtctctcaggaaccacatcggggtcagcatgggacatgttcccagcccaaacacggaagccagcgaaccaggggcaagaggcatgcccgccgccagccaataggccgcgcaccagaaaagataaggccgcagcaaaaccagcaggcggcggcccgcccacgtcccggccccctgttcatcaaggccggaggcggaaaaataccccgccagcaggaaaaacgtcgccagcgccggaccaatcagccattggttgggaggaaaccccatggaagggacgtgctgcatgataaccaccagcgtcgccagcagccgtgcaatctccacccagggcaaacgagggtgaatttctttaccggacgcgggggagacggtcatgacagccccattctggatgattgttttgaaaaagcactattttttattgattttatagacgaaaagcggccttatcaaccttcacaggcatcgtattatggaaaagacctgaaaatgatttttttctcatattttcatttatggctttgtatttccatatgggaaataacacgcattccgagcgcaaggctgcatcaatacacactcccgcactggatattcccggattttgccgaaacagctgctgccatattgcaggtgctcccggatggttctcccattgcaattccgtattttccattcatcaatgccgtatgtcgcgaacgcctccccttccctgcccgatgattcgtaaaatcatcagcggctcctttggggaatcagggctgaagccgccgcaaggacctgaaggcccacaaaaaggaaaaaccagaaccagccgccttccacaaaaccgtaagagtgcaggccaatccccatgaggttgacaccgaaccacccccaggctgccacgatatttccgagcgaggcaagaacgaggaagccttgacaggaacagacgtgtaaaagtcgggcatggagggagcaggagcaccaaaggagtgtcattaacgcaccgttttctttagggtcccacccccagaaccgtccccagctcatgtcggcccagatgccgccgagcattgtccccagaaaacagaagaagagcgccacgagaaggatgcgacagactccgcaggccccggctttcagccccttttcaccctgtccgaagaaacgggccaccagatgatatgaggctaaaaacccggcaaaaaaaacacttccgtagcctatcatgatggtcattacgtgcatggtgagccagaaattcgaattgagaacggcacgcatcatgcccatggtatcgccgctgtagggcaaattcatggctaccaggagtgagagaaggccggaagcgcaggcgaccgcggcaacaggaagctgacggcggaggatataaagcgtcccgccgaataatgaggctaccgcgcccgcaaagacgaccgaggaatacaaattggtaaccggggggcgcgattgaatgtacatgcgggccgcaatgccgaataaatgccataataccgccatacacaggaagaccgtcgcaaaatgcagcaatgccttccgccgcttgagaaacagagagaccacgaaacaaatcaacgacatgccgtagagaaggaagcctcccaagaagggttcgagagcattgatgcaatgctcgaaatgcagtttgaaagaatccatgggcagtattgactccaattccccagaaagttgacgcagagtctctgccgcagtagattcatctccggcagcataggcatcgcaggctgcggcataggctttcagggcggtccgcccggcgggactgagatttttttcgagcagagcggcagccggggtcaggtagcttccctcatgagggattactcgcagggccacattcggatccgcttcttctacctgcacaagagcctggaggaattgaaaatagcgattggcacggtaaagccggtcaagcgagggatggcgtttttcacgttcagcggcttcaagctctgctgaggcttcggccatagcttcatgccatgcatcaagcgtccccaaacagcccgatgtcccctccagacggagagcgagcgcaacgccggcctgctcataaacggcgagtgctcccagtacggcttccgcggcatgggcctgaggagaatttccccgcagagagccgcgcagcaggccagccttctcaactgcatcggcataggaaaaataacggcctcgtccgccaaggaattcgaccatatctctgttatccgaacgcagaaaaggttcgccggccatttttgccgggcaggcgtttaacgccagcaaccacttcaccggcccggtccgagagcctccaagattcaccgacgtgcggccgcttgccaatttaagggaatccgccgctgcgcttgaaaccggcatcactcgtccagccttcaggcatggcagcgcgccgggtgagggcacccctatgccgtcaaatgaggaaaaagaactaccaatcctctgaaacagaggcgataacgcaatcgcaagagcaacgaaaaacgccgtaaataaagtaattttacactgcatgtttttttcgggcacgcagggttgggagaaaaatcagcaacatacccgcaaatacgccgggcaccgatatccacggaaaaaagcgcaccggattgcgtacggctgtgattacactcgtgcggcccccattggcgtaactgctctggtaaaaaatccagccgccaaaggagaccggagcattcatgcgaataaccgtttccgtgctttccccgccgcgcataaagcaaacctcgcttgaaaagctgctggggatatcgcttcccgtccatgtccgggtatcaaattttttcagctttactgaaaaaccaagggggatattttttcttccattcccttcgcctgccagtatttcgtgtgagacctcacctgcatccagaacgagtattccctccgtacgcagaaaatactgcaacgcccccgccaaaatcagtactaccagaaaggcatgcgtgaggatcaagcccacgccgcgcagtgtgaagcgcgcacgccggaaaacagacgccgaaatattcagtacggctaatgcccctacgccggcgccgccgatcagaggaatcctcccgaaggaaaggcagccccagctttcaaaatacctggcctgtacagcggaaacaccgacagaccgcgcctcaagagtgccgagaaaaatgagcagcacggcgtaagccatcagcacgcacgcgagacggggagatgccatccactgcaaaattttcttcatcagcagatactgaatgaaaaagggccgcacgcctctgccgctccaaccgggaaacggaagcatagggtcgtgcggcctgcttcgtgatgaataaagacggaataattattttttgtccgtaaaggcagcttccacttcagagatcatcttgttcagagaaatgatgccgccgccggaaagataccatacctgcgggtcaagcaggatgatggcgccgtttttagccgccttcgttttgttcacaagcacattgttgaggacattcggattttgggccgagcggccgatagctaccgaacggtccaccgcaaagatgatatcgggattgagcatggcaatgtattcataagtcacctgctgcccatgaacccccaccttgatgtttttatcagcctgggccactcccagggcatcgtgtaccaacccaaagcgggaacccgaaccgtaagcgcttaccttgccgtcgttcgtaaggagaacgagagctttcttgccgctggcctgggccttgtccttcgtacgggttacggcttcatcaatgtttttgacggcttcggctgccttttcgggcacgccgaacacatcacccagaagcctgatgtttttcttggcttcccccagctgatccttggccagagtatcgaccaggtaaacgggggcgatggaggaaagtttttgataataatcctgctgacgtcctgaaataataatcaagtccggcttgaacgcattgatggtttcaatattgaattccttaaccgttccaagatccgtatattgttctccggagaatttggagaggtaaggaggaaggaattttttgggtaaagccagcgcgggagtgacgcccagttcaccgatggtctcaagcgaaccgtagtccagcacggcgacacgtttcggattgaccggaagctcgaccgtgcccagcgtgtgcgtggcggtgatcgttttggcttcatctgcggcggccatggaaagaccgggaagaatcaatgcggccagaaatgcggtgattgttgttctcatattatttgttgttgtttgttgttttgggaatttaaggaaattctattcatagtatacgcatatctttttatcaccatagggttctatggcgatatccataccgtaaatatcgcgcagcacatctgtccggatgatatcttccgtcggcccttgatggcacaggactccgtccctgaatgccaccacgtaatccgcgtagaaagagacaaagttaatatcatgaattacgatgcagatcgtcttgccctgctcccgcaccagggaacgcagcagtttcattatgcgcgccgcccgatgcatatcaaggttgttcaaaggttcatcgagaaagatgtacttcgtgtcctgtgcaatggccatggcaatataggccatctgccgctggccgcccgaaagttcatcaaggttgcaatggcgcaaatcggcaatctcggtaagttccaaagccttttcgatttgcagaaaatcctgattttccaggcggccgcgggaatgagggaaacgtccgaagcgaaccagttcctcgaccgtgagccgcgccggagtatggagggtttgccccaggatggtgagggttttggcaagctcccgggaatcccatttcctgagttccctgccatcaatggatacagagccttcggtgggttccagaaggcggctgataatgttgagcatcgtgctctttccggcgccattgctgccgatgaaggccaccatccgatcagagggaagcctcgtgctgacgtgcctgagcacgaaggtttcacggtattttttggaaatgtctcgtatctcaatcatatacgtttaattttcatgatcaggtagataaagtaaaccccgccaacgaaattgatgattacgctcaggggcacggagaagttgagccaccgttcggtaagcagcatgccgaaagtcaatgcggctacgcccacgagagccgtgccgggcatgaggacgatgtggcggtaggtcgggaatatgaagcgtgcaatgcttacgatgagaatgcccaggaaagtcaccggccctacgagcaccgtcgaggccgaggccagaatagagacgattatcagggagcgcagcaccacccatttgtagttcacgcccagcgtaatggccgtggagcggcccagcgtaagcacgtcgatcttcctgaggtcgcaaaccagccagatgaccgccgcggcgatcacaagccccgccgtaagcagcagttcttcattgatgcggttgaaactggcgaaaaggcgcccctcaagtatggcaaattcgctcggatctatcagcacctgcatgaagttcgacaagcctccgaaggttatgccgaagatcatgcctaccaacaccacaaaataaatattgccgccattctgtccacggaacatgtagaaaaaaatacccgtagatacgcagaccatcagcagcagggctcccatgaaacagagcgggctctgcatggtcgtcaattgtgtgctgcccacgaagtagagcacgagcgtctgcagtaatacgtagaggttatccagccccatcacgctgggcgtgaggatatagttggttgtaatcgtctggaagacgactgaagacagccccacggccgttcctaccagcaccagcgcaataacgatgggaatgcggcgggccatgttaaagtcccacgtttcgggtgtcatcccctgaaagacatatacgagcgccagtcccacgcagagcagccccagaatcaggaaggccgggaacgcgcgatgccggccggcagcattgcggaaggcatcatctttttgatgttgaatggaatcaggcatacgtttttctatggaagagcatggccagaaatacaacaccgccgaccacgctcaggataacgccgatagggatttcgaagggggcgatgagcatgcgccctgccacgtcgcaaacaagaacaagcatggcccccagccaagccgtatcaaacaagattttcttcacggcatccccccggaaaatgctcacgatattgggcacgatcaacccgatgaaggggaggtagcctacctccacaatcgtgattgagctgatgatggatactatcaccagtcccatgcgcatgatgcttgcgtggttcagccccaacgccaccgcggcatcacgccccatgccggcaatcgtaaagagatcggcataaacataggccagcagcatcaacgggatgctggcatagagcaattcataattgccctcaatgacaagggagaaactcccctgcagccatgatgccatattctgtacaatatcaaactggtaggcataaaaaacggctccggcattcaccacgccgcccagcatgattcctatcaggggcaccagaatgacattctggtgccgcacgcgcgcaatcaccgccagaaagcatgaggtgcctatcagagaaatcacgaaggcggcccccacgcgccaaatgggagaggccccgggcagataaaggatggcgaccattaccccaaagcggcaccactccatcgtgcctgccgtggtcggcgacacgaagcggttattggtgatgcgctgcatgatcaagccgctgatggccatgctgctgcctaccacgagaatgctgcagaggcgcggaatgcggctttgcagcatgatctcccaccagaactgcagttgctcgccatccatccgccacaggtcggacaaggacacttgagctgccccgataaagagcgaataaaaggcaaggccaagcagaaagctccactgaatgattctgaatgccattttctcaggctttcaacacggctgcatcaagttccatttcaaacaacagattgtcccggcacacatcggcctgtatgccgatgcagggcatgatggcgaggccgcggcgcagagctattttttcgtagtgaggggcataatccttgtctttgaaataggctacggagcggacgacatccttccagcccatgccgcgtgatttcaggatggcttcaatcacgtccagcgagagctctgtttgtttgtcgatatcgccgagatgtacggattcgccgccaggggcaatgctggccgtgccggagacgatgacttgccggaagagagggtggtccacttctatcgcacggctgaatgagctgcggtaatcctgagctgaacattgcagaggcgaagggatatcttttaccgtcacacggtcgcccttaggccgaatggcaaatacgcgggccgacaaggccgcatgttcccgattgccggaaccaatccccgtactggccggaaccagacgatcaaacacgccgcggctttcaaaaaatgtgtcgcgggcgcggttgaactcttcataccagtccagcaggcggttgttgtaaaaccatgtgcggaccacgtgggaaaaatccatgccggcccggttcagcgcttcttccatctgccggaatacatccaatgtctgctcagtccgtccggctgtccggtcgcggggcgacaaaccgcccaaaacggcatactcggcatattcatcctcataaaaaaccccggcggtgcggccattaaactcaatcgcccgggcatttatcccctccaccgcgcaaatttgcatgcctcgatagaaggatgcgcccgttttcgtacccaaaaaggcagtcatccccgccccgggcaccgaggagagatccagatcagcgctgccgtacacttccgggccaatccaccgaaaaccgcttttttcagcttcttggagtaattcggcatgctcggccaactgcccaggttcgcttccggcaagcgtaacgaattgcagagatgcgccttcgccgcccagcgggagcgacttgacggaaacacctttatttttttccaagttgcaggtcatgagtatattatttttttaaagtgctttcaggaattgaatcagttggccgcgctcttcggcggagagatggcggaacatttcacgggagaattcgctttcaccgaaatgccacaggatagcctcttcaaagtcgcgggcgcgcaggtcatggaacatatctgtatgattggcggttttgtgcatcagcccccttccccagaggggcggcgtacgccagaaacgagaacgtccgcggttgatttcccccatatcgtgacgcagcatatccgtataggggcggatggtctggtttgcataaccgggaagcggcttatattcccccgttgtccattcaggcttgtggcaaccgacacaccccagtttattgaagagttcctgtccgcggcgcacgtcaggcttgtccaggttgcgggcggcaggcacggccagcccgcgatgccagaccatgaaatcttcatactgctgcattgagagttcctcttcctgcgggccttcaagaccgcttacatcaatgccaagttccttctgtttttcgagccattcgggcgtcatgtagatgttcggacggttcttgcgcgttacattcgtcacgttccaaagcgcattggcgccaggaccgttttccagtgtggcgcgcgagcagtcccacgtgaactttccgaggcgccgggtaccgtcgggctcgtcaatccatttgccaggaatccccttcaccgggcctgtcatgctctgctggcgcctgtattcggcaataatatcctcgtcacggatggcatcaagcagccccgttccgtaaatgccgattgttgattcgattgacacgcggtaatcggccggaagcggaagcaacggctcaatcacatctgccgtgggataagtcaacgtgccttccgtcggcttgcccgcattgtagggcgttccgtccgggtatttgtttccgtactggtcaacaaaatcatgccattctattttcacccccttggcataaggcacaaaaggaggaaccgctttcgtctgcagcatgcccgtgtaccccttaactggggtgccatcgggattatgtacaaaggccagataaccgttgccgtactgcctgtcaaaattgccggtgcgctgtccgcggccataaccggggtggcaggccagacaggatgacttaatgtaagtgggaccgagaccgccgaagcgattgcgcttcacgggtacgaagttcccttcaaaaataatttcgcccgccttgaaacgattcgtcaggccggcttcagtaattgccggcgattcctgctcaaacgctttactggtggcattaaacactgttcccttttcaccgcccagatagtaagccggcccgggctcgccttctttcgtcctgagcacggggggcgtgaaatcacggccgcggtttacatggcagctcacgcatgaagctgtcatgtattcggctttgatattgtcaaattttgatgcactcccctgggccggattaatcagtgcgcgtccggaaatgcggggatgtcccaaaacgccggcattccttgccgtgtccgggataaaagattgttcaggagccgcatccccagaacctccggaattcactattgcccaggcggccgctcccgctccgagcaccaggacagccgcaggttttgcaaattgtcgatactccatgtgcattgatgattggcaggctttccagaaatacggcccgtggtacatgtctccgtcagccggccgacaatatggatattgcagcccagggtctttccgaccctgggcaatgcgtgttaaattacttcacaagaagttcctgaaccttgtcgaggttttcggaaagttccttgcaactgtcgatgattgccttgagctgctcctttttgtcgaggtttttcaccagggggccctgtatggcgtcgaggctcttgaataccttggcgatagaacctttcacagcctggtcaaccttcgcggacttggcggctacgagaggggaaatcacattgtaggatttttctacgctctgtacgttgtggcgggagtccaccagagaagtgtagctgtaaagggattcacagtcggcggcgtcagccgtttcgtagggcttgcccacctttgaatcggctatttcgtcaataatgtccttgctgccgccgatgatttcatcaagcacttcagagtttgactcgtagcggctgcctgcctggccagcttttttgaattcccccgcataggacttgccgggttctatttcagcttcttcaagaatcttggccttctcttcgctgatcttgtcagaacccgcccaccaggcttcaagcgtgatggcatcctctgcaatcacctcggccacagcggcaaggtaggaaagctgtccgggcgtcagatcggcggccttgcggggttgcccatctcggaacaagaggtattcggcagcatggaaaccgcgcgtttccgcgccgagggaattgcggacgtaggcggcgtcaatcgttacgctcttgctgtccgcgtttttggcgacggcgtcaaggttcgtggtatccaggggccaggagtccagcttcgggtcaaggttggcgaaagcagccggaccaaagaggaaggattctgaaagttcccacggcacgcgcgtttcaagaagaagcttccctgcttcagcaaccttggcatcggtaggagcagccttcagctctttagcggccttggcgaatttgagagcgttatcactcatcgtcttgtaggtgggaatgacaagctcatccgcgtaggcggcaatcgccgcgctcgttttgtccaccttgggggaagcggccttggccgcctgagcctggctaccgaaagccaggattgtacttccggcgcaaaagccggccagcaacatgcgtttgtatgcgttcatggttttttattgataatgaaaacatccgtatcctcctcagggaggcatcctccaatccggcaggatttcatggcatatccgccattttttcccgccggagcggaaaataataatccggccaaacgatgtcaattaaaaattagtttaaactaactttgcaacaaaaaacccctcttgtggccgcatgccggaacatcggcatgttattgattcggaaatattttctgtttccgaatgcgcccaggagccgcctttcaccaaattccgaatttctccgcgacaaggctccttacctcgccaaaagatttcactgcgggcggattttccgtatggcctccaagaaacttctccatccagatcatatggtaccagcggccgaatttgtatccgcaccgatgaaatttccctgcaaattgataccccaaacgtttatggaactggacgctgtcccgtgtaagataggggtcctcagcttcacagggataagcaatgcacgcgtttaaattcaaaatattctgcatggagagaatcttttccagagctgcatacagttcccttcccgttcccatttttttcatgtcttcccgcacgtataccgtcgtttccacagcccagcgatacgctgcgcggtccttgaacactcctgcataggcataaccggaaatatcccctgccctttccgcaaccaaataggggtattttcccagtatgtgatctattcttttttcaaactccgtcactgcaggcacttcatattcaaacgtgacagctgtcttttccacatacggagcgtaaatttccagcagcttggccgcatcccgcctcgttgcaattctgattctgctgcttttcatttcggttgactgtgctgggcccctgagccggaagcgctgccgatcattctaatatttcacaagcgattgtcaatttgaggccgcccaagcacccgccatttccgggaaatatcatccgccgcatgttttccgccgttcccgttcatgaacgggaagaaacggggtcaatattcatttcaaaatcagagtaaaaaccgcattttttaccttgtccggtaccccgtgtccatttatggaaagccctcccgaaaaagtgaaaaaaggccggagtccatagagaatccggtcttttggaaaggataggatgccacttcgcggcgaaatccgtctcaggagtaaaaaccgatgtccggttcccgatcccgccgcctgcgtttaaaatacggattgcggtagcggtggatgcatttgccggaactcccaggggtataatgaagaggggccgcctccttgacggcttcacggctcaatatctccacaaaatccttcaaggacatttccagatctgcatcgtggcatgccagcgcggcggacaggcgcactttgccgttgtcatagtccacatacatggcgaacagcgtggtctggtacaggtgccacggttccccgcccatttttccggactggtgttggctgatggcctccaacagccacgtcagcgcatgttccagttccagattgtccagaacatcccgtataagagatgtttcgcggccgaaaacggccacgctttcctgttgtcttgccctgttgattttcatgtcttggttctcctttccggtttcccttgttaagcagaacggcggataattctgccgctccaattgttttggacactttttttcaacaggttgttcaatctgaattctcaactgtgtcagccatgaccactttcccaatgtacgggagttcccggtaatgcccatccaggtccattccaaaccccaccaggaaatcgtttccctgcgtaaaagccacgtaatcagcctcaaaaggcactttccggcaacagtgcttgtccacggctacagcagtgaggacttccttcacccctcttcttttcaattcccggcaaacttcatccagcgtagcacccgtatccagaacgtcatccaccaccagaacaggcacatcgggctggaaatccccgcaatccccctcccacgccacggaaccggaatttctcattccggcataactggaaattttgacggctttcaccgcaggccgggatttcaaatgcttctccaacatcgcagcgaaaggaagagcgccgttcagcagcagcaataaaatatagggttttcctgccatggccctgtcaatggatgcggccagttccctgacgcgcgcgcagatggcatcctctgcaatcaaaggagtgatggtgtaagtcatggaaacggagcatgataatgtttcctgtaagaaaatcaatccttaaagaaggatgaacggagacaaaacattcccggccgggctccagcaaattttacaagaagcaggactggtcttcatagtcaggaggcaacaaaaaagcgctctcaagattgtttctccgccccggtcggcagagaatgcggaggcgcatttaacggtggcttcccgccggaccgcatggtaaagtaaggcagaaatgactgattccccttccaagcgcctttttattctggatggaatggccctggcttacagagcccacttcgcctttttctccaatcccatccgcaattccaagggagtcaatacttccgccgtgtacggcttcgccaatacgctgctgggcattctggagcacgaacgccccacgcacatcgcggcctgtttcgacacttccgctcccacggcgcgccataagctttaccctgcctataaagccaaccgggaatccatgccggaagagttgagcgaccaaatgcccctgattttcagattgctggaagccatgaatattcccattctgcgctatgaaggctatgaggcggacgatacgataggaacgctggcacgcatcgcggacggtacggagggattccagacctacatggtttcccaggacaaggacctgggccagcttatttcctccacctgctttctgtggaaacccggcaaaaggggcaatgaccacgaagtgattgacctggcaaagctcaaggagcaatggggcattgaacgtgcggaccaggtagttgatattctggccctgatgggcgacagctccgacaatattccggggcttcccggcgtgggggaaaagacggccaagctgctgatcggagagttcggctccgtggaaaacctgctgtctaatacggataaactgaaagggaagcgcaaacagattgtggaggaaaacggggacatggcaaccctttccaagcaactggccaccattgaccggaacgttcccctgacggtgaccctgcctgaattggttaaaagagaacccagtccggaagaactgcaggcccttctccaggagttggaattccggtccatgcaggccaagctgttcgggaaaaaagcgccggagcccagaaaagcccccctcccggcagacgatttgtttgctcccgccccccggacggaacagccttcgtcggcgaaaccctccgcccctgtgtcgggagtacggcagaacggttcgggacaaatggatttatttgaggaacgccatttgaaaacggtagatgatttcaggcacgaatatattattgcagatacgccggaagcccgttccgccatggcagccgagctggaaaagtatgattcctggtgcttcgacacggaaacgacgggcctgaatcccctcatggacaacctgctgggcgtcgccttttgcgctgaaccgcacaaggcatggtacatgcctgtctccggtccggcggatctggaagcagtcaggccgctcctggaaggccccgcagagaagatagggcatcatctgaaatttgacctggaggttttgcgagccaacggcatccatgtcaaaggcccctttttcgatacattgctggctcatgccctgatcgctccaggcatgaagcacggaatggacgttctggcggaaaatttgctgcaatattccacgattaaactgaaggacattgccgctccgggagcaaaaaaacgggaactggacaccagcggcgttcccgtggaagtaatgggcaaatattcggcggaggatgcggatatcaccctccagctttccgccgtcctgaaaaggcaggtcaaggaaagcggcatggaaaaactgttccgtaccgtggaactgcccctgcttcccgtgctggcggacatggagttttccggcatccgcgtgcttccggaatccctggagaaggcttccgtcaaggtaggagccatcattgacggcctacgggaaagaattgaagaagccgcaggccatcccctgaatctgaattcccccaagcagctcggagatttcctgttcggagaactggagctggtgaagaagcccaagaagacgaagacgggccagttcgtgacggatgaagacaccctttccgctctggcctcccagcatcccattgtagcggatatcctggcttaccgggagaatatgaagctgaagagcacatatctggatgcgctgcccaggtatatctgcccgcgggatggacgcatccatacccaattccaccagatgctgaccgcaaccgggaggcttgcctcccaggatcccaatcttcagaatattccggtaaggacggaacaagggcgcctgatccgcaccgcctttgtccccgcctcagaggaatacaccatgctgtctgcggattattcccagattgaactgcgcatcatggcggctctttcaggagaccccgccatgtgcggagcattcagggaaggacgggacatccatacggaaacggccgcccgtgtgtacggcattccccgcgaccaggtggacgccgttatgcgccgtgcggccaaaacggtgaatttcggcattatttacggcatttccgccttcggtctctcccagaggctgggctgcccccgcggagaagccgccactttgattgaaaactattttacccagttccccatagttaaatccttcatggaagacctggttcacaaagcggaacaagccggttacgcggaaacgctattggggcgacggaggatgattccggaaatcaattccgccaacaagaccattaagtccgccgcggaacgtactgccatcaacacccccatccaaggcacggcggcggatatgattaaaatagccatgatccatgtggacaaattgctgaaaggcaccagatcccggcttatcctccaaattcatgatgaattgctggtggacctgcacagggatgagttggctctcattcccaagatagaggaagccatggtcagcgcgctgcccctgcccaacggcgttcccattctggtggaagccaggacgggaggcaactggctggaagcccattaaaaaatattttttcaaaagactcccacgcgttccgcattccagaattcccgcgccttcccgatgccgtattttcccttccggccgtatcgggttccagtttgtggacgagttgtccctccagcgggaaatttttgaaaagaatgattccccccgcggcagaaaaatgggtgggaaaggatatccctttgaaaaaatgaattaaagaatcagagcgtcccctgcctggaattccggaacggtcaccagggctctgccgtcttttaacgccactacctgcaccttgcgttcctgcattcctgacggcgtttttacctggatggagctgccgtccctgacggcggaagcgggaatccacgcggaaacgggaacttgaacattgatggctacttgaagagccatgttgacgggagccacttgccactcggaaacatgggaggcattcggctccagggaggcaatcaacacggcggaattgcttttggaatccagcgccgcatccaccgccgtaacgcggcccagccactgcagccgttttccattattcagcacgcaagaggcggtcagagccgtattcaccttgccctgctcatccctgggcaatgcggaaaattcttccagcggaacgggaatccgtatcatccgctcctgaagaggaattactttccccaccggctgcccggcgaccacgcgggcaccggctcccacagagcattccaccacctggcaggtatagggagcttccagcaccgtatcccggagggcctgttctgcttccgccacatacgcctccgcggcgttcagcctggcgtttacggctctgcgctgcggaacccggagcaccagttcggattcctttccgcttttggagacggagctgtatgtctttttgatggctttcagggcttccgcctgctccgtagaaacatccaggcgggcctgttccagttccgcctgagcgttcgccagtcgggcgcggtattcaaatttttccaattccatcaggggggttcccttcaggacaatttcccccacattaaacaggggatgcactttgtccacctttccggaaacgctgggagaaagcatcgtcaggtaggaggcctttacgatgccgggcgcggaaatggaaagagtgttcgtctgcagccggaggggtgtctccgttcctgcgggcgcgcagcccctgtttccggaagaggaaaaagagacggacggctccgttacaatagccgtgcctatcagaagcgccacaatccccaggccgatgcctatggaccaggacgttccctttttttgaggggcctcgctcatcaacagttccgggggaaacgcgtcccgttatttgggatattccgtctccatgatgtgggaataggcctccgccgtttccacagccacggtttcaatattcttcatcaactgggcaaactgggcttccgtgaggtccatgccttccagaacgaaggactggcggtaataaacatacccgctgttggggtccagctgaaaggcgccggccgtctggtccgcgttcagttcgctgaggataatgctgacttccacacggcggttttcaggaaccttggcggcaaaaagcacgtcaatgaccagcgtctccggacgttcaatcatggtgtacaggaggctcaccggggtgaacgtatcacaggggacgaatgcgatgcctgtcttaatgttgtggtcatcagcggaagtaatccattccgtttcttcccctctctttctgagaacggtgtacacacggtccaaaaggctgagatgctggttttccatattgaaaattgtttaacagggggttgcttgcaaaggcgcatgcaacgtacgcgcccgtttactgaattcaagcttactggcatccttctgattcgtcaagctctcctgacgtaaagaaattgaaaaaacacgtatgcggacggcataaaaaatacagacgccgtccgaaagggcggcgtctggaaaaaacgcgtgcgccgggagttccggcttctttccgaggttctttttacaggatatccccgggctggtagcccgccccgtccggaaacctgtccgtcacttccttcaccatggagcggaatgcttccacctgggcgtcagccatgcccgtagcggaggaattggaatcaaaaatgcgctgaaggtccgcccggtctattcccaggcgcccgtcttccgccaggcggtccagcaaattgttttccatgattttcccggcgcgcaggtcattggagacagccacggcatgttccttgatcacctcatgggcggtctcccggccaatgccgcgcttgacggcctccatcaggatggtggttgtcatcaggaaaggcaggtagcggcgcaattccgcagccaccacggcctcatacacgcccatctggttcaacacggtcaggaaggtttcaaacaggccgtccgcagcgtaaaaggaatcaggcatgactacgcggcgcaccacggagcaggaaacgtccccttcattccactgatccccggccagcccggaaatcatcatcaggaagcctttcaaaatgacgtggaagccgttgacgcgctcgcaggagcgggcgttcatcttgtgcggcatggcgctggagccagtctgccccttggcgaacccctccgtggccagttcatggccggccatcaggcgcagggtcttggcgaaggaggagcagccggaggtgagttccaccagcccggaaaccacggaaaagtccagagaacgcggatatacctgccccacattcatccacttggcagggatgcccaggtgggcgcacacgcggtcttccagttccagcacgcggacggcatcctgcccgaagagggaaagctggtcaagctgggttccaacggcgcccttcagtccgcgcacgctgtaacggtccatgagggaaatccaggcccccaggccgtgcacgatgtcttccccgaacatggcgacacgcttgcccatggttgtggtctgcgcggctacattgtgcgtgcgtccggcaatggtcacgtgcttccactgttcagccagggcgctcatgcggttcaacacggccacggccttgtcccggatgatttgcatggacttccaaatctggagctgttccacattttccgtcaggtcccgggaggtcattcccttatggatatgctcgcatccggccagctcgcaaaattcttctatgcgcgccttcacatcgtggcgcgtcacgcgttcgcgtgcgtcaatggagggaaggttcacctggtctttcacccgttcataggcctcaatcaccccgtccggaatatccagccccagatccttctgggctttcatcacggcaatccagaattcgcgttccagaatgatgcggccctctgcggaccagatggatttcatggcggcggaggcgtacctttcagccaggacattgggaatcacgctcatatcaaaatgtgtatatgcgggggttatcaaaaacggtgagccgccatgatcatgacggaagggaaaaaagcaagcactttcccgcagcttcacggattagggacgccggggaattccgccggccggcaaagcctcccttccatgcccctgatccggcattgcgcctccccgccaataaaaatttcaagaacaggcaaaaattcttattcccgaataacggaatcgcaacacctccgcttaccgccatgttccctcattcccttggcggcggctccaggccgtaccgggcataaccggagacgatttcctgaaggatggcggaaattttttccagggaacggacggggacgtattcatactttccatggaagttgtggcctccggcgcacaggttggggcacggcagccccatgaaggagaggtgggctccgtccgtgcctccgcgcacagggacgatttccggcctcactcccacggcttccatggccctgcgggcatgttccaccaggtgcatgtgcggaagtatcttttccttcatgttgtaataggaatccgtaatttccgcctttaccgtcccctccccgtatttacggttcagcagggccgcacattcctgcatgaattccttcttgcgctcaaaggcctccctgtcatgatccctgatgaggtactccgcagccgcccgttccacatctccccggagtgaatccagatgataaaagccctcgtacccttccgtaaaagcgggattctggaacgcgggcagcattccctggaattccatgagaaccaggcaggcattcagcatcctgcccttggcgcttccgggatgaatggaagagccctgcaccgtcaccactgcggaagccgcattgaaattttcgtattcaatttcccccagggcgcctccgtccacggtataggcgaaatccgcaccaaatcgcgccacgtcaaaggcatccgttccgcgtcctatttcctcatccggcgtgaaggcgatccgtatctcgccgtgaggccgttcggggttcagcaggaaggaggctgccatatccatgatttccgccacaccggccttgtcgtccgcgccaagcagggtagttccatccgtcacgaccaggtcctggcccaaataatccgtcagttcgggaaaaacggcgggggaaagcaccattccctgttccggattgagcaggatgtctccgccgtcgtacgagcgcacgatgcggggcttcactccgctgccggagactcccggagccgtatccacatgggccacccagccgatgacgggaacattcccctccacgttggaagggatggaggcgtaaacaattccggaatcatcatccagttccgcctgcgctcccatgtccttcaattccccggccaacagccgggccagctccgtctggccgggggtggatggcacggtggcggaatccgcgtccgactgggagcccacggagacatacttcaaaaaacggtctaaaacggagatgttcatgggaaaaatcaaggattggcaagagtctaccacccgcccccgcgaacacaagcacaagacacggtttattcttgcgattcaggacggtgtgccgtatgtaaacaaagcttctccccatgatgactcctctcccccttggcattacccttgctttgtccctgacctgcggctccatgccccttctggcccaggggtcgtatatgcccggccccatgcccgccaccgccgggacaaagcaggatccaacggacatgtacctggaggcgttgaggctggtgacccaagccgcaggactggtggaaaaacgggattatataggagccatccgcctgacacagcaggcggaagacaagttcggacgcctggctaagtcttatccccaatggcgccccaacctgctgcaaacgcgccgccagctcaacagggaaaatctggaccagtggcagaagctggcccagcagcaggccgccgcctcttcttcatccggcctggagctggaacgcccggcctccgtgccgaagcgccccaggccaaaacccaacatagccctccctcccggctacaagggcgtggaattccctacccgtcccggagaatccctgatcaataccatcccgtccccttccgtttctcccggggcggctccggaagtggtggagagcaattacgaacgcatccgcagactgctggataaaaccaccatggagaacaatgctctgatccaggctctcaagcgcacccgccgggagcaggaggagattctggcaaaactggccgtggcatccgccggagaatccgtttaccgggatgaattgctcaaggtcaaaaagcagatggaggatgaaagaaagaccagcaacaagcttattcagactctcaccaggagagtggaggaactggaacaaaatgtcacctccctcagccaggacaaagcccgttatctggcgcagatcgccgatcttcagctgcagctcaaggagtaccaggacaagctggacaaagtgacggatgagaaaaacgcccttcagaaagaccgggaccaattggcggccctggtggagctcaacagcccggacaaaacaaaaaacctgttggaccgcaacctgacgctggcggcccagctcaaggatgcccaggacaaaatcgccgctctggaaacagccaaatccgattccgaagaacagcggaaagccaacctgaaagcgttggaagaggtgcgtgaggaatccgcagacctgaaacagaaactgattgccatccgggatgaaaacatcggctaccgcaaacgcatcacagagttgaataccaagctcatcaatgcggatgtggaactgtccaagctggaggccaatccggaaaaaagcccgcttcttctggaagaaaaccagctgctgcgctccaccatcgccaagcagctccgcatactttccgtgcaggaccagagccgctccctgctcatcagcacttataagcggctgcatcaggaaaatccggacacggcggaaatagcctccctgatggacaatgaagaagccatcaagctcactcctgcggaaaaacaaattgtcaacgccattgccagggataacaatatcaatgttcccctgacggatcagcagaaggaaaaaatcaacaagctggcacaggccctctctgcggaacgcggcaaggccgcccagcttgctcgggatttggaactggcgcgcagccagatgaagaccaaagcggacaaatccgccagaaacgacaagaaacaggcggaagccctggcgcgggcccagaaggccctggaacagaaaaacattcaggtggaggaactcacccggcagatggaagaactgaaaagccgttccgccgaacaggcccgcctggccgccatctccgccggaaccattactccggaccaggaaaaagcgctgaaccggagcatggaagccacggtacgccggaagctggaggcggaagccctggggcaaggcgccgcagaagccttcgccaaaaaacgctatgccgccgcggaacaactgtaccggactttgctggacttccagccggcccacgttccggccctggtcaatctggggaccattctgcttcagcgcaacaaggcggaggaagccattaaatttctgaaaaaagccacggaactggacgcctcctcctcccccgcatggttcatgatgggggtggcccaataccgcgccggggaagaccaccacgccatcgcctccctgacggaaacggtcaggctggatccggccaacgctcccgccctgctttacctgggcaacctggaaaccagcgccgggaactatgaaaaagcggtggcccactttgaaaacgccctgaaaatccagccggaatcaccggacacgcacttcaacctggcctggacctattcccggctgggccgcacggcgcaggcacgcaaaagctatgatgcagccatccgctgcggaggcttgccggattccgacctggagcttgccattaccggaaccaccacccttccccgcaaaaaacaggctgcggaccagaatcccgcctccgccgcaaaagaggacggcccccagctggccgcggcaataagcgatccgtctgccattccccacgacgccaatgaagtgcctgctcatgtggcggaggatccgaatgcgcaggaaaagccgtccgccggtcccaaacaggtcgtcgtcagccaccgtccggaaaccgaacccgtctctctggcagcccaaatgagggaaactgcccctgcggcggcatccgcacaacctccggcagaagccgcaactgccgcaacggaaacgcccaagccggaaaagcaggaacctccgcgcaggaaaagccgtttccgaatcggttcctgatggaattcttccctttcccactaaataaagccatgtatcacgtttccattttaggactgggcctcattggctcacggattgcacgccatatggccggaatgggcgacaaggtcaccgtctggaacagaactccgcgggaagattttccggaagcggttcctaccccggcggatgcggcacgcgcttccaaagttatccagctctacctgaaagacaggaatgcctgtctggaagtgtttgaacaaatgagaggggctctgacaccggagcatatcattctgaaccattcaaccattgacctggcgaccgtcggcaaactctccctgatgagttccgccatcggctgcacgtatgtggattgcccgttcaccggctcccgtttgcccgcggaaaaaggggaactggtttactacgttggcacggattccaccacactggaccgcatacgccccgtgctggagcacagttcccgggacatcctgcacctgggcggcatcggagccggcaccgtcgtcaaactggtcaccaacatggtctccgccaccatggtgcagagtttgggcgaagccctggccatctcccaggcgtacggcatttccccggaaatgctgggccaggccatttcccggaacgtcatcgcctcccctctggctgcatttaaactgcccctgatggcaaagcgtgacttttccacccatttctccctggacaacatgaggaaagacagtatttacgctcaggaacttgccgcagaaaaaggaatccacccgcctgttgccgccctggtttcctccatcatggggaggctgtgccgggaaggtcgcgcggaagaggatttcagctgtctggcggaacaattcgactaactttttccgttgatgaaattcaggggaacatgcgtctttctgttgacggctcttcttctgctccctgccggccggggacaggaacgaaaggagcctggcaatgattcttccgcggaagtgcggcagacggaagaagaatcagcatccgtccaggatgcggattttattgatgacgcctcggatcgtccagtattgcagggcagttccaatgtaaaccccgtcgttcccccttcaccttcggcaaggaccgccgccggagcggaggaacagcccgccaaaaggcagccgttcaccagcgtttccacctccaagcaattccacgtcaccgggatggactccctgctggccggggccatcgccacccgggcggatgccatacgcaccgcgctgctaaaagtcctcaagcagcctgacgaatggaaaaacggcatcaacatccgcctggtaggagagccgggaagccccgttccggccaaccccgtccgcatgcaaaccgtcattgtaggcaataccctctcctatagcattttcattcatctgggccacggaatcaaccaggacagcctgcgccgcgccatcgtctccaccctgctttatgaaatgatgctgcgcacagtggacccggaaggcctgccggacaacgtcacgctgcccccctggctgattgccgggttggaacaggctgttctgtggcacaataatgaagctgaccgtgccatgtattccaccctgttccagcagtccggaattatgactccggaagaaatcctgaattgccgggaaccggaaaaggaactggatgcgacctcttacgcggcctatcaaacttcctgtggagccctggtgctttgcctgctgaaccaggaaaacggtccggaagggatgaaacagcttctggaccaggctattctgggcaatgacgatcccaggaacctcatcaaacgccattttccgcagctcagcctgacccccacttccctccataaatggtggacgcttcagctttcccgcatggcgacgcctcccctgacggaaactctcacgattacggaaacggaacgtcatctccaggaagcccttaccctggtcaagtatgatccggatacccgcaccaccgtcacatttcccctggatgacctggaacaggcccgttccctgccggatctgaacaggcagctttccaacgtggctggcagcctgctcaacctcagcaggcgttcctttccttcataccggcccgtcattgtagaatatgccaagctggtggccctgatgcaaacagggaaagtcaacagccgggaagccgtccccaaaatcagccagcttcgggaaataagaaacctttccatgaaaaccgcccgccgcgtccgggactatatggactggtatgaaatcaacacgcggtccggaaccggcaagacattcgcttcctacgcggcagccgtgaaaatcctccgggaacaggaacagccggccaatacccctgtttcccgctacctggacgacattgaaaaactgtacaccctcccggccagggctcccgtgccctccctgcatgggaaggattaaggaattaaggaaaggcgttctgcggcggagccatcctgccgtccccatcaagagcgccgcacttctaaaaaacggcttcccgtgccgtgcaatgttctatcttcacggcatcacaaaatgccgatgagttctccccggaagccggatggtgcggaaatctggtgctatgaagagaattgcttgccggaacatgccaaatcaccggcagaaaccatgcatcacgtcatgaaccaatagactgtccgtcagcgttttgaatcattccctgcatcagcgctcatccccgccgcagaaacgcgcatttttttatgtggtctttttttattcagaaagattcagggattgtctttcccaagatgatttgcaatcatcaccccgaattattttcatatcactacataatatggacacgtcattgaaactccacggcctggtggccgccgtacacactccgttcaaggcggacggttccctgaacccttccagcgttgacgcccaggccaagctgcttgcctcccagggcatcaagcttgctttcattaccggcagcaccggggaatcctcctccatgcagcttgaagaacgcaaggaaatctattccgcctggaaggaagcctccgccaagcatggcgtggaagttatcgcccataccggttccaacagcgtctgggacgcccgggaactggcctcttttgcccaggaatgcggattcgtggccaccagttccctggccccgtcctactacaagcccggcactgttcagcgcctggtggaatgctgcgccttcgccgcctccggcgctcccgacctgccctattattactatgatatccccgtgctgacgggcgtacgcttcaatccggtggatttcatcaggctggccaaggaacagattccgaatttcgcaggcatcaaattcaccaatccggatctggccctgtaccagaccacgctgaattacgacgagaccgtggatattccctggggtgtggacgaatggtttacgggcgccctttccgtgggggccaagggcgctgtggggagctccttcaactttgctccggccctgtaccagaaactcatgaaagcctttgcggaaggcgatgtggaaacggcgcgcgactgccagtggaaatccgttcagatgatcaatatcctggcctccaagggctatatgggctgcgccaaggctctgatgggctggctgggcgtcgatcttggccccgcccggcttccgcagggcaacccgaccgcagatcagctgaaggaactccgttccgaactggaaggcatcggcttcttccagtgggctttaaactgaaccccggaacctgactgacatggctgcaactcttgatatgccctctttgggcaagttctaccgccgccagcttctggaagacgttctgccgttctggttcccccgcgcctacgacgaaaaaaacggtggtctttaccactgctttgacgcagacggcacgctggtggactccgacaaatccgtctgggcccagggccgcatggcatggatgctgctgacgatgtacaacagcatcgaaaagaatacggactggctcaaatgggcggaaagcgccttggaattcctgaaaaccaagtgcgttgacccggcggacggccgcatgttctttcatgtggctgccgacggcacccccatccgcaaacgccgctacgcctacagcgaatctttcgccgccatcgcctttgcagcgcacgccagggcgaccggcagccgggattccgcccgtgaagcccgccactggttcgacatcttcacggacaactgcttcactcccggcaaaatggttcccaaattcaccggggaacgccctacgaccggtctgggcacccgcatgattaccctgaacacagctcaggaaatgcgcaagtacctgggagatgacgacggcttctataccggctggacagaccgctgcatcaacgacctccgcaccctgttcatgaaacctgacatccaggcagtcatggaagtggtgggaacggacggctccatcatcgaccacttcgacgaacgcaccctgaaccccggccatactacggagggtgggtggttcgtgctggaagaagcccgccatcgcggcaatgaccccgaactcatcaaggtgggttgcgacatgatcgactgggcattcgcccgcggctgggacaaggaaaacggcggcatgctgtactacacggacgtgtacaacaagcccgttcaggaatactggcacaacatgaagttctggtggccgcatgatgaagcgctcatcgccatgacgctcgcctacaagctcacaggggaagaacgctatgccatccgtcacgacatggtgcgcaactgggctttctcccacttccaggacgttcagcatggcgactggttcggctatctgaacaaggacggttccagggccaacaccctcaaggggagcctctggaaatccttcttccaccatccccgcgccatgtggtgctgcgcccactactgcggcgccatttaagggaaaataaaatacatcgttacttctgaaagccgtttgctaaatgcagcaaacggcttttacttttgaagacagtaggaaagatatttcaaaaatagttccctatttagattgcctcctattctacagtattttatcatattccatgagaaaaatctgcgtattttttcatggagctaatgaatccaactcttcacatccatgaaaagcatcattaaattcaggtgcgatagacactaaagcaacaaaagggaaatatcatgactggtgaaaaattcacattgaggcaatattccgttagcgccatcttggggttgatagaagcagatgagttcgttataccggaaatccagcgcccctttgtctggaaacgaagccaggtacgggatttaattgattccctatataacggctaccctacgggctatattattacttggaaaaatcctgacgtgaaaaccaaggagggaggaagagccaacgggaaaaaagtacttattgatggacagcagcgtgtgactgccctcatggccgctattgccggcaaagaagttctggatgaagactttaataaagaccgcatcaaaatagcctttaatcctcttgccgaggatacaagcaagatttttgcggtgcaggatgcttcccatttaaaagacaaacgatggattccggatatttccattgtatttgatagcgactttgatgcgttcgaattctccgttgaatattgtactatcaatgaaggaataaagccaaacataattaataaggccattgcttctttaagaggaatcgcgaacagacaaattggtgtgattgagctggatgccgcactggatattgatgaagtaactgaaattttcattcgtatcaattccaaggggacgtccctcagtcaatcagactttgtcatgtccaaaatggccgcagatgtagaacacggaggcagcatgatgcgcaaaacagtagactacttctgccacctagccgtgaaacctgatttttactcttcattggtacgtgataaggaattcaagacctccaaatacgctgataaaattaaatggctagcccatgattatgatgacatttacgatcccgattatggagatatgctgcgggtatcatttatgcaccagttccgcagaggcaaacttgctgatttggtcagcctgttgtcgggaagagatttcgaaaccaaggaatatcgggatgatatcgtggcggaatcctaccaaaaattggatgctggcattgtacaattcatcaatcaatacaattttacacaatttgtaatggcgatcaagggtgccggtttcgtatccagcaaacagttgaattcacaaatgacgctggactttgcgtatactttgtatttgatgctgcgaagtgatccaaccattccgaatgaacaaattaaacggcatgttcaaaaatggtttgtcctttccacgctgacctcaaggtatatcggatctccagaaacccagatggaccgtgacatgcgtaatattgaagaaaaggggttcctgaatttcaaaacagaagtggaagcttcaaccttatcagaaacattttggacggttactttgccccagaatttggaaacgtcttccgtaaacagtcccgccttcaatactttccttgccgctcaaattaacctaaattgcaattccctgctgatgaaagggaccaaaatctccgaccttattaccatttcaggggatgtacatcacatcttcccgcgtaattatctgaaaaaaaacggcattgataataagacgaaatataatcaggtagcaaattatatttatcttgatacgcaggtaaataaagccattggcgacgatcctccctttgcctattttagcaaagtacgagaacaatgcagaacaaaagctatcacactgggaaatatttccgatgaagaaacgctttactgcaatctagaggaaaatagcatccctcaccatattattagcatggatatcactgattacgaatcttttcttcaggaacgccgcaaactaatggcgaaattgatgcaacggtattatttggaattatagccatgctccaattgataaaaccaattaagtatagatgatatcctccgtccgcaccaccacatcgccgggatccagcatggcattaatcagggaacagaagcggaatttgcctatatcttccgcttttacggaacattcctgaatgtctccgcgggacagcaggaaggcgcgcttggttcccggaagcaggaaagtttccggagtaacccaggaggacccgtccccgaacaccacgttgctgtaccgcgtatccgtcaccattccgttccggagaatcagcgcttcttcgtcacagcccaaggccgcccctgccgccagaagccctgtccgatcctcccacttgcatgagtaatccagcccgggcatttccacacacgtcagcgtcttcacctgccggggacggtagggctcaaaggaggtgcggcgcacccttccccgcgtatcatacgtgatatggcatttgtaaactccacggccctccgggccgggacaggccgaaagaacggaagccagatcggggacggaagcgccgtccgaaccatgaacgccgatggcggcctccaccctccgctggtgccagggaagcagacagggagcgccattctcccatttaacggtttcaaaaatcaaacggcacataaactttggcaacagcttcccgatattcctcttccatccggctcatgacggtaattcctccaccgctcttgtataccattccccgctcatcctcctccatgaagcggatggagacggcggaatccaaatcccgcccgttgaaaaagccgaaaattccggtataaaaccccctctccatatcctccgcttcctcgatggcccggcaggtggcctccttgggcgctccggtcacgctcccggcaggaagcagcttcagaaggatttcccccaggcgggaacgccagttttccggcaacagcccggaaatctcggaactgcattgaagaatagtccctttggacgtttctacagggctgatatagcggtaacgcttcaccctcacgccggttgccaccatggaaagatcattgcgcatcagatccacaatggtggcggattccctattctccttttcatccgtttccagccagcggcgcgcttcctgcgtagcggacggaaccgttcccttcatgggaaacgtggaaatggagcggccgcgcaccgtgacaaacggttccggagaaaagcagacgcagccgcggccgtgcactccggaaatccgcgcgtccggccccagcagcatccggtaaggcgcgcgggcaaaccggaacagatggcgcagcgtcaggttggtttccacgggggtggacacgcataaattcagcaggtaggaatcccccctcatcagatggttccggacggaggcgaaggatgccgcataccgggacacgggatggggggacggaatgaaccgcagccgttccggaagcggagggccgccgtcctgacttcccatcgtgcccagcggcagggaaaaagcagccatgcgctccccctccgtttccgaaggttcaaacagcaggttatggcccatatcatgggagatgacaaaaaagaacggacatgccgcacggcctagggcattcatgcggctgatggtctgttcccgtgtgtacattgtcgggaattactctatcatgtgcgcgccatgagtcaaccgaacgtctggatcatcgaccaccgggattccttcacctggaatcttgcggaactcgtcagaatgacgggaatggccgttccgcgcgtggtttccaatgaatccccggaactggaacaggcggttcaggcgggggaaaagcttatcctgtctcccggtccgggaacggtggaggatgcctgccaccgggccaccttccgtcttctggaccgcctgccccgctttaccccggtgctgggcgtatgcctggggcatcagatcctgggcgtgcgcttcggagcccgtctggaacacctttcccggccccttcacggagcgcgggaagtcatatgcaggacggagcagtgtcccctcctggaaggattgccggaacaatttcctgccgcgctttaccattcctggcgccttgccgcttttccctggccggaggagctgattgtcacggcgagggattccgggaaaaacgtgcaggccatccgccacaggagcctccccctttacggcattcagttccatccggaatccatcctgacgccggacggagaagcgctgctccggaacttcctgtcccttccggcaggcagcagggaaaaacggcgcatcaaatgattcaattccagccgcctggcatcagggatgaacgggacaagaccggaaagtgtctcactcccgtgcggttccggttcccatgcccggccgcttcagagataacgtttttcacctttatgaatgcacaggacgaactcaagatcagggacatggaaatcctgttccagccctttcactcacgcaagctcagcactcccacccgcatcgtccttccggccatgacccggggattttctcccaacggggttcccacggaccaggtagccgcttattacaaaaggcgggccagacatgaagtagggctcatcatcacggagggcactttcattgacgagcccagcgcctcgccttcctccaactatcccaatttcttcgggggcgcttccctgcggggatggaaaaaggtgctggaagccgtccacaccacggattgcaaaatagccccgcaactctggcatgtgggtatggcccggcccttcaagggagaaaaccttcccaatccggagctgccgcccatcggcccttccggaattgacgtaaacacgctggaacaaacggtggaaccgatgagcatcgctaaaattgaggaggttattaatgcttttgcgagggcggccgcggacgccaagcggctgggttttgacggtgtggaactgcatggagcgcacggctacctgattgaccagtttttctggaaggagaccaacaggcgcacggacgaatacggaggcgacctggtaggccggacccgttttgccagccgcatcatccatgccgtccgcaaggcagtgggcagccagttccccatcatcttccgcttctcccaatggaaaacgggccattataacgccaagctggcgtatacccccatggaactggaagcttttctggctccgctgacggatgcgggcgtggatatctttgactgttccacgcgccggttttgggaaccggagtttgaaggttcccgcctcaatctggccggctggatcagaaagcttaccggaaagcccacgatctccgtcggctccgtggggcttaagggagattttacgaatgcctttgacggggggccggaagcggaggccgccagtgtggaacctctggcggaacggctgaaagcaggggaattcgacctgattgccgtaggccgcgccctgctggcggatgcggaatgggcggaaaaaatacgccatgcgcgggaaaaagatatccacctgtttacgaaggaagacctgaaaacgctgaaataacggatttgcctgaccgcaaggatgatgcgggaactcactccgcaaagccgggagggagaaaaacgccaggccgccccaaaacggagggaccggcttctttccccgtttcctcagcaatcatcattcccgaaaaggagattcttttatttcttcctgacgcggacagtcaggtacaacagccgcaaaagagccaatgccggaatctgaagcgtcagcaaataccacggagcggacccgaaatattccagtacggttcctgccggggcataccgggtaaaaccgtaattcgtatccagccagatattcaccggaataatacaaaccaggtaggcgtcgcacaaacccagcgcccgcatgtcgtcccacggccgcgcacgccattgcaggacggcgggaaggtaaagagcggaaatcaataaaagcccgtgcccgatgaaaaagacgaaaaaggcggcagaggggaaaccgtcgtgaagcatgggggtaatcaatccctggacgcttgccgtcagcacgccgaaatacgccacggcgcatgcccagggtgtacggaaccacagggcgataaaacagaccagagccatcagactgcaaaaatgcagcggaagcctgtcctgccagggctcccaatgttctctgacgatgcggccgaatgtttccatcagaaaagtcagcaggaaaaggcttcccagaacctttcccacaagcaaacggctctccatccggagccgccggcatccccacaggagcccccctgctgccagagccacgatgcccagggcagcccagtgcggcaggttccaacggacaaacaggggcgcaatttctccggtcataaaaaaatccatcaacgggaaggaggaggttccgggcacgcatgaagtttggcgctgacggcctccaccttaagacgcagaacacatacggaacggaccatgccgggggtaaaatccgcatccctgcccgtctggtgcagcatgatgcggcgcaaggcatgcatcttttcctcatcctcccggagaaattcgacgacgccacgccccatgacgcagccgtaggcgtaactgtaccggcacgggacatccccctccagcaacacatgatccccatccatttcaaaagaaacctccggacggttttgcaggatatccagcttcctcccttccctggcgcagtggaaaaacaggctcagggaaccatttttttcttcatatccgaagttgaggggaactacatacacctccctgccgtcccacagtcccaggcggcacaccttgaaccgggcgaccatttccatcaaatccccgtgccgggtcacttccctgtcttttcttctcataagccggcgccctccatccattcattcatgcaaagggcggcacgtccggccagcagggagccattccgtacggaagccgcccgaagtccgcaaatatccgtccccgcctgcatcaattcacaggcatggccggtcagccactcctccatccgggaaacatccgcctccacatggaactggagagccagggcatacctccctacgcaaaaagcctgatggggagtcacttccgtggatgccagcaggcgcgctccggaagggacatcaaacgtatccccatgccaatgcaggacgggcaccccctccagataacggagaggggacaaacgcccgtcccccgtcagggatacggttccccaccctatttccctggcctttccgggataaacgcggctgccgagggcatgggccatcatttgagctccgaggcatacgcccagcaaaggctgccgactttccagacgcatgcggaccaaatccagttccgtcttcaaatagggatacgattccgtatcccccacccctacgggaccgcccagcaccacgcacaggtcagcctccagccattcccggacggaaggacagggagcgcccgcccggatgtaccgtattcggaagcccctgtccctgaaaagaggttccagcgtaccgagatcttcaaaagccacatggcgcagggccaggcaagtgcgggatgcagaacggctactcatggcgacggaggatgaacctcaacaaggaatatagaaaaaaatcctccgggaaaagctttttgccctcttccctccgcatttccggaaccaggatgtccatcatgaaacggaaatatccgccacatccgcaaaaaagccctccgccgcacggcataaatccacaggattcaattcaatctggcaccccagacgtccgccgctcaccaccatctccggcagggcttccgcgctggcatcaatcaccgtagggtatttccttttcatccccaaagccgtgcagccgccgcgcacgtaccccgtcacggcggtaatatccttcaccggaagcatggaaagagccttttctcccacggtgcgggcagcctttttcaaggaaagctccgcgcctatgggtatcacgaacacgtaatactgccgaggagctccctccgttaccagcgtcttgtacattttctcctcctccaggttcagtgcttccgccgtatgccgcgcatccacaaactcgcggcattcataggaataatgcctgtacgggatatgcagcgcatccagcaggcgcatggcatttgtctttgcctccttctttttggacataaacttgaaaagggaacgtcccggtaacatagaaaaaaagccttcctttgacaaggccgagccccccaacggcccctatgaaaaagtggaacggaaacgggaatttctctgaaagagcggtaaggacagcaacgccgttctcccagtgtagcccgttcacagcggagaatttcagaaacggcggacggcgaaaaagaaaaaggaaaaaacgcctcatttcctcagaacccttgacttgccgctggcagaaaagataacatccggtatcatggaagattatcgtgtccggagaagccttggagaacatgtcctgcgctgctccgtcctgattgctgcgctcttcatcatgtctctgggcatcgctttgtccaccaaggctgacctgggagtctcccccatctcctgcacgccctatgtgctcagcctggcattccctctaaccatggggaccgtcaccatcctcatgcacctgagttttgtggccgtgcaggcggccctgctgaaaaggcaattccgtccggcgcatctgctccagattcccatagcttttatcttcggctttctgacggatttttccatgtggattatggcgcctctggaaccggacggatacctgtggtccgttattctctgcctgttcagttgcgtggtaatcggattcggcgtctttcttcaggttaaggcagattccgttcttctggcaggggaaggcatgagcctggccttcgtcaaactcttcaaatgggaattcggagccgtaaaaaccgggatggactgcacgctcgtctgcatcggactggcctgttccctcatcttcctgcccggactgacaggcatacgggaaggaaccgtggtggccgccgtcctggtgggaatgatcgtccgttttttcaacaggcacgtcttctggccggacaggctcctggaacggctggcgcgccccggggcagcaagcgaacctcctccgctggcacaaacggccgcttatgctccggacgcccctctggtcatttccattgaccgggaatacggttccggcggccatgccatcgggaaaatgctggcggaaaagctgggcatccgattctacgactcggaactggtgtacctcacggcctcccggagcggcctcactccggactacatccgcaagcacgaacaacagctttccagccgcttcctgcacgaactttacgcccagaactatgcctacacggcggaggaaatgcctcctgaagacgccaccttcctggcacagagcaaagtcatccgggacattacggccagtcaggcatgcgtcatcgtgggccgctgcgccaacttcatcctgaaagggaggcccaacctgtttagtgttttccttcatgcggaccgggccacgcgcatgcagcgcattattgaaaactatggggtagaacctggcggggcagcccgggccatggacatcatggactcccgccgccgcacccactgcctgcactacaccgggcaggaactgggcaatgcacgcctctacgacttgtgcgtcaacacgtctgattacggcatggaacgcacggtggaactgattctggaagccatcaataccagaaccgaacaatcttccgctgtagaaacggttcccgtccgctccgcatcttttcccgaaccggaagaggacagcattcccggagaaatatccctcgcctgacaggggcaaatgtatccagcagccaatacttatgtaacaactgcccgcccggcaccttattcaccggtaatagaatccgttgtctgaaaaaactgcctggccgataaataggaaactctttccccctttccataatccccgcaaagggaaagattccgtatctccttcagatgaaaaaccggctggaaaacgaatggccctttccacacaaaaggctgcccctcccaactccccgtttttttgccgactgcataattcaaaacaacaaaaggcagcctttctgagtccaaaaaacatgagactctggtcactccacccctcttacctggatgctgtcggcctggttgccctgtggagggaaggcctcctggcacgcaaagttttgcaggggcagacaaaaggatatatccatcatcctcagctcttccgcttccgggagacggaaaaccccattcatgtcctggatttctacctgaaaaccgtccatgacgaatccatccgcagaggctacaattttgatttaagcaaaatttctccctgcgaaagccgtcccccttcccttctcctgccggataaacagctcgaatacgaattccttcatcttctggacaagctcaaggaaaggtccccccggcaatattccctgctgcagcaaacggcctccattcttccccaccccattttccaagtagaatccggagatatttgctgctgggagaaaaggcttttttataattaaaacgaccgcatttcccactccgacaacggttttattccaataaagccctttgtttttttaaagcccatgcggtgagggaaaaggctcatggcctctgaaggatcggcagccttaaaattaatttgagaaagaatagcacgaggcatacacactgacaaaatggtctgttgcaccatatgcccagtggcctgatccaatacatccgtttgaacatgcactgccacccttgaaagcggcaagaatgaaaataattcacgggcaattcttaaagcacatccacatacgtagtcttgatacagctcacaaaacctggtccggggcatatttttcacgcttaacttgcccctggcagtaagggtcttaatctgtttgggaacaacaacctctccatctatcgtcaaataaataacagcagtatcagaatcaggaattgcaaaatgaatctcgcatcctatttcctgaatttcattcaaagggttaatttccaaaatagcctgctgataggctaaagtatctccccgattaatagataacgccagttcatgaagcgccgaccactgactgaatttaagctcataacactcaatggatttttgataattatactcatccatttgcttcgcatgaacgactttttgttcaagatcggatctgattttttcaacttttccgcacatgcggtggaaaaacttaggcctgtacatcctaagtttttgcatagcaagacgttcttccttatcgttttttaccggatacgccggagggggctgattaactatttccccccagtcaaacgaatcgcctacttcatgatgaattgtagttaattggctgatacgctcctcaaatttttcgacttccatttgcgctctcactaattcatcatgtttttgctgaagagccaattcccttagggccagtttttcctgccttgcggcctcacgggccgctcttctgctcgctgcttcgagttctcttaaaagtctgctgatagttgccatattcttaaaacaggaactgttttacctaatttgtaaagactataaagataatctttccggtatagatcaattcctcatgagcatgctctttaatccatgcctggcaaaatggaaaaggccttaaagcgtttgtgctttaaggcctttatttggtggagcatagcgggttcgaaccgctgacctcttcaatgccattgaagcgctctaccaactgagctaatacccctttgactttcgtcttggtgcgtcctgttgaggacggggagaaattatcatttccaaagcgggcatgcaagctttttctacaaaaaaattgccccgggatgttttttccggaaaatactgaatccggaaaggactgcaaatcccatacagacgaaaacagggacagtctgaacaaatatgtttgaatgagattcattcctgttttacctttgcataaatgatgaaacgtcctctttttattcatcgtatgatattcgcctgcgctctggcaattttgttcctgtcctgttccgttcacgcccaggaaactccagctgcgaaaggaccgccggcccagacggaggacagcggcatttccactccccgtagagtcgccggactgggcgttctggcattcctgatcggctggatgatttggaggagcagttccagccgccagaaggacggaggccatgaccaggaggcaccccgggaatgacgccgtttttgaaaggttgccctggttcctgccgtagtcgttgcaggaaaggagtctccggccatgaacattattctacccatcctgagctttctgtgcggtgtcatgctgacggaaacagcttccggctcttctgaggagggaaagccttctcccggcgtagtgcaggaattgtggttcggcattccgggggcatccgtaaaggacctgacccacaggaagatctttgaaacggcggccccggatgtccgcacgatcagccatctggatgtggaaaacctgggagacaggtacggagcccgttactccgccctgctgaaagtcccggcaagcgggaagtaccgcctttacctgtcttccgacgattccgcagagttatggctgggcaaggatgcctcccagaaggacatggcctgcatcgccaccgtcaaaggatattccgacatccataattggggcaaccagcccaaccaggcttccgaacctgtccagctggaagctgaccgattttattttcttcaggtgattcacaaagaggatggaggcccggaccacatgtccgtcgcctggtccgggccgggcatccccgcccctgtcatcattcctgccacggcgctattcataccgcccggtatcttgccggaagaaaaaaaacaatccccagccaaagcggactgaaagtttttttgattaccttcccgccgggtccccacagggggcatcatcaatttgccgacgagaaaataaatattttccataaaactccatcaatcgatcatttccaatacgaaaaaaaaccggacctccctccatcggggaagcccggttttttctcgtcgtatatcatgtagttaattgaagcggcctgacacagaaaaatgccaaaacaccttctgaatccaaatctagcggatttctaatccgcggtcaagttcccagtttgaaaggaaaggctttgagaaaaagtcccgatgcttcacggggctatccatcttggggtaaaaacctctctctttttcaagtgaagtataagaaggaaaaaggaatttttgctattcatgtcgtttcaaaatccgggaatcatttgttttcaaagattcccttctctttgaattcataatgaacggcattgcttctcagaggagaaacacttctctccctgaaaattttttatcatcatgaaggttgcggattagaaatccgctcttcatttctggaaaagaaaatgtgtctttatcgggtaatattcagaacacctgccagtaaataatgttactgaaaaagcacgctttcatcccttccctatgttcggcatgaatgaattttccgctattgaaacataaatagtcattccggttatacacatgttattatcattttattcacaattcttcttcctttttctccagtccccgcattctttttcccgggaacagcgtgaaacaggaaagggacatacggaaacggaataaaaaaatggaaatttcccatccttccagaaaatccgggatgaaacataaaattttcacaggcgcttttactttccgcaaatcatccccataccttttccattcctttgaaaacaggttcctcccatttccccggagcaatacgggaaaaacgtgacgacaattgtccttgttccaatgacggacgggcggtagattttccgcgccatatgagcagagcatccagaacagaacgccttgattacctgaaagaccagttacgtaaaagggttgtcatcctggatggcgccatgggcaccaatatccaaaaattcaggctgggagagggagattaccgcggaaaacgttttgcggatgcggaatgctatcccaacgatttaaagaataataacgaccttctggttctgaccaggccggatatcattcttgatattcaccgccgctttcttgacacgggacggacggatattctggaaacctgcacattcggagctaccagcatcggccagcatgattatttctggcaccgtccggaggaaggcagccacaaggaccagcagtatttccaggaagtggtggacgcccccgaattgaaggcccttgtccgggaattgaatttggcggcagccgcactggcccggcaggcatgcgacgaagcggaagctgcagacggcaagccccgcctggtggccgggtccatcggccccatgcccgtcacctgttccctgtcccccgacgtaaatgatcccggtttccgcgccgtgaatttccgccagctcaggcaggcgtaccgggatcaggtgctggccctgctggaagggggggtggacatgctgctggtggagacgattttcgacacgctgaacgccaaggcagccctgttcgccattgaagaaatttttgaggaacaaccggaaagctctgttccggtcatggtatccgtaacgctgacggacaaagccggacgcacgctgtccggccagacgattgaagcattctggaactccatccgccacgttcgccccttctccgtaggcatcaattgcgccctggggccggacctgatgcgcccctttgcggaagaactgtccggactggcagattgccacatgtccatttatgcgaatgccgggcttcccaacccgctcagccctaccggctacgaccttctgccggcggatatggcccggttcatgaaggaatacgcggaacagggcctgctgaacatcgtgggcggctgctgcggaactactccggagcatatcggcgccattgcggctgccgtggaaggaatgcctccgcgcgttccggctccccaaacgcccgcgcttcgcctgtccggatatgaagcgtacaaccatacgcgggaaaaaaacaccctctttgtcggggaacgctgcaatgtggcgggttcccccaaattcgcccgcctgattcgtgaaggaaattacgaggaagcggtatccattgcccggcagcaggtggaaaacggcgcgctggtattggatttctgttttgacgacggcctgatcgacggaccgcaggccatggtccgcttcctgaaccttgtttccgcagagccggatatcgcccgcgttcctttcatggtggattcctccaagtgggaggtgctggaagcggggctccaatgcatgcagggcaagggaatcgtgaattccatttctctgaaggagggggaagaagaattcctgaagaaagcggcgctgattaaaaagtacggcgcggcggtcgtggtcatggcgtttgacgaacaggggcaggccgccaattacgaggaccgcgtccgcatctccagacgggcctatgacttgctggtaaaccgggtgcagtttcctccggaagacatcgtttttgacccgaacgtcctgaccgtaggcaccggcattgcggaacacgccgattacgctcttgatttcttcaaggccgcaggctggatttcccggaacctgccgcatgcccacatttccggcggcatttccaatgtctcctttgctttccgcggcaacaacccggtacgggaagccatgcattccgctttcctgtaccacgctacgcagcaggggttggacatgtgcatcgtgaatgccgggatgctggaggtgtacgacaatattcccaaggacaggctggagctgattgaagacgttctgctgaaccggaggacggacgccacggaacgcctgacggattacgcggaaaaactggctgcggaaaaaaccggagacggaaaggagaaaaaaaccgtactggcctggagggagcaggacgttgccaaacgtctggaatattctcttatcaagggcattaccgaatttgttgacgcggatacggaggaggcttttcaggagctggggtccccgctgaacgtgattgaaggccctctgatggccggcatgaaagttgtcgggcaactgttcggggacggcaaaatgttcctgccgcaggtggtgaaaagcgcccgcgtcatgaaacaggctgtagcctggctcaccccctatatagaagcggacagcaaaggagccgccaaggcgggaaaagccgtgatcgccaccgtgaagggggacgtgcatgacatcggcaaaaatatcgtcggcgtggtgttgggctgcaatggttttgaaatgattgatctgggcgtcatggtccattgcgataccattctggaccgggcggaagcggaacaggcggacctggtgatgctttccgggctgatcaccccttccctggaagagatgtcccatgtagccgcggagatggaacgccgggggatgaccattcccctgatggtggggggagctacgacgtcagccctgcacacggccctgaaaatagccccccattatcaaggagccgtggtgcatacggaggatgcctcccaggtggttcccgcagccgcctccctggtgggagaaaaaaaggattcctacattgccgccctgaaggcccggcaggaggaattgcgcaacaatcatgaaaacaaacccgcccgggacctactgcccttggagaaagccagggaattgcggtggaagggagcggaaggcggctatctcccccccgttcccgcccgtcttggcccggtttccatcggcagcctgcacagctccgtaagctgcggctgctgcagtgacgatccgcgttattacgtaactgttcaggagcttatcgagcgcatggactggacgccttttttccacgcctgggagctgcacggctcatgggaccgcgcccgccgggagttccgcaccaaagacccgtccaaggctgaggcggccgcggcgctgtaccaggacgccctccgcctgctggaacaggccgtgaaggaaaaccgctaccaggcgcgcggcgtcataggcattttcccggccaattcaacagccagccatgacgacatcaccgtctgggctgatgaatccagaaccactcccctggctacgctgctgacgcagcgccagcaactggacaaacaggggaaaccccggctggcgctggcggatttcattgctcccgaaggcgtcagggattacgtgggggccatggcggtcagcatccacggctcccgccgctgggcaaaggaatgggaagccagaaacgactcctaccgcgccctgctggtcagctctctggcggaccgcctggtggaggctttcgcggccatcgcccatgacaagctgcgccttttgtggaatattccggaaggggccggcgtgcgacccgcctgcgggtaccccagccagccggaccaccaggaaaaggaaactgtcttcaccctgctccacgcccgggaggaagcgggcatgagcctgacggaaacatggatgatgcagcccgtttcttccgtctgcgccctcgtcttctcccatccggaaagcacttatttctccgtgggcgtcaccggggaagatcagcaggaggattacgcctccagaaagcgggcctcccggccctgacctcccctttcccttttatgcagcataccgaccagatacaggccctttcggaattcctgctggaatacgccaccaccctcatgggcgcgggggtgcacaccaaccgcgccgtgcgcaacatttcccgcattgccgccgcgtacggatacagcgcggacatgaccattttccagcgcaatatcaccatgagcctgatctgcaaggatgacgagacgctgcgccgcacctccgtccggaaactgaaacccctggcgttcaacctgaacctgatccagcagctcagtgaattgagctggctcccggtggacaacaacgtcagcattgcggaaatggaacaggcattccgctccatggtgcgcaccaaaagattttcccgctggacggacctgctcctggtcagcgtgggcaacgccgccttctgccgcctgtttaacggagacctgtgggccatgctgaccgtgttcgccgccaccatgctgggctttctggccaagcagcagcttacccggttgaaatacaacccgctgggggtcatcatcctttccgccttcaccgcctccatggcggccgcgtgcgccgtccttttccagataggctccacgccgcagatcgccctggcagccagcgtcctgttcctggtgcccggcgtccagatgatcaactccatcatggacctgatgcacggccacatcctgatgggcatctcccgcggcatctattccatcatgatgattgcctgcatcgccatcggcctctccgcaaccatgctcatcgtaggggtaaacagcttatgaatccggatcttatttcctccatccttctggacgggctgatggccgccatcgccgccacgggatttgccgtcatctccaatccgcccaggcgcgccattgccgtttccgccgttctggcggccgtcggccacgctttccgcttttacatgctgcactcctggaccattgacatttccagcgccaccttcattgccgccttcaccataggcatgctgggcgtcatgacggccaagctggtgaagtgcccggcggaaatattcgctttcccttccctcctgcccatgattcctggcgtgtacgcctataagaccatcctggccctgatgcagttcatgcaggagaaccaggacgcggccgtcatgaaccgtctgattgtggacatctgcaaaaacggcatcaccgccttcttcatcatcttttccctggtcatcggagtagccatacccctgctgatgttcaaacggttgagctataccaggcatctggtcaaagaaccttgaccggcgtttcgcccgtccttaaccggcttgagcttccgggaaaatatcaccggggcgttgaaagccaaaggcgttctttcaaggataaaatccaatagaagaagaacagccccgtagcctccctgtccggcccgttttcatccctctcccttgaatcttgacgcgttccgtcatcctccctaaactttcttccgtacaaccgcaactgcaatggctgaaaaaaataacgccaacattggcttcgaaaaacaaatatgggacgccgcctgcgaactgtgggggcacatccccgccgcggactatcgcaaagtcatcgtcggcctgattttcctgcgctacatctcctgcgcctttgaacggaaattccaggcgctcctggcggaaggggaaggctttgaaaatgaccgtgacgaatatctggcggacaatatcttctttgtcccggaaaaagcgcgctggtccgccgtggccgcggcggcgcacacggaagaaatcggcaaggtcattgatgaagccatgcttgccattgaaaccgaaaacaggagcctgaaaaatgtccttcccaaaaactacgccagcccggatctggacaaacgggtgctgggcaacgtcgtggacatcttcaccaatatggacatgggggatgcggaggcggggaaagacctgctgggcaggacttatgaatactgcatcgcccagttcgccgcctatgaaggcgtgaaaggcggcgaattctacacccccgccagcatcgtcaaaaccatcgtcgccatcctgaaaccctttgacaactgccgggtttacgacccgtgctgcggctccggaggcatgttcgtgcagagcgtcaaattccttcaggcgcacagcgggcggaaagacggcatcgccgtttacggtcaggaaagcaatgcggatacctggaaaatggcaaaaatcaacatggccatccggggcattgaagccgacttcggcccccaccaggcggacaccttcttcaatgacctgcatccctcccttaaggcggacttcatcatggccaaccctccctttaacctctccaactggggccagtcccagctgcgggatgatgtccgctggaaatacggcatcccccccgcgggcaatgccaactacgcctggatccagcacatgatccaccaccttgccccggacgggaaaatcgggctggtgctggccaacggctccctgtccacccagtcttccggcgagggggaaatccgcaaaaacatcattgaggcggatttggtggaaggcatcgtcgccctgccccccaacctcttctacagcgtgaccattcccgtaaccctctggttcatcagcaaaaacaagaggcagaaaggcaaaacgctgttcattgacgcccggaaaatgggaaccatggtcacccgtaagcaccgcgacttttcagaggaagacatccggaaactggccgatgcctttgaagccttccagaaaggctctctggaggaaatcaggggattctgcgccatcgcagacctggaaaccatcaaacggcaggactacatcctcacccccggccgctacgtcggaattgaggaacaggaagacgacggagaaccttttgaagaaaaaatggcccgtttgacttccgaactgtccggactcttcgagaaatcccacaaactggaaacagaaattaaggaacgattgggggccatcgggtatgaaatataaatggggagacctcatcacgttagaatatggaaaacccgtcaaggacaaagactccaaaagcggtaatattccagtctttggaacaaatggacaaattggaaccagccatctgcctcctctatgccctcatgcttccttcattttaggcagaaagggtgcatatcgaggggttcattattcagatgttcccttttctgtaattgatactgctttttatgctaaaaatatacggacagatattttatccttaaaatgggcatactacaaattcctgacatatgatatcaatcgcatggatagcggttcggctattccttctacagatcgatacgaaatatatggaatagaagtagaattaccacccatcaaataccaacaaaaaattgtttgtttattagaattccttaataaaaaaattgaattaaataaccgtataaatgataatttagcggcttagattttgacggaggaaacatcaatctcgccggacatgagtttgggaagaagtgcatctctaagagcggcaagacgctgattttcttccaggtttgttacgatagcggaagccataggagccattacactattaaaatgagcaagcgtcttactatccggtagaactaattccatagcttttacacgatctctgggtaattcagtctgaccggtgcttcctgtatgaagtgactcgatttctttttcatgctgagtaccccacaacccaatatagaaaatcaaatttttctgttgctggccggacaatcgtaacatgagaatcaacagtaagattatgcggctgaaaccagatcggagctgctctccctaaggtaccatcgccagttgagttaattagcaagtcaccaaagcgaagccacttatcattgataactttcggcctatggtttcgtgcaagagaaagatcaatcatgtgattgcgaatgcacttctgattgattattatttggctggtatcatcagcatattttggagttataccgcgacttaccatcgccgtgatgtcttctaaagtgacattcttccattcgtccggtgcaatgcctccgaatggaacacaattgacaaaccatgatctgaaaattgcggcggcttgctgctctaaattatcatttatcttttggttgttctcaattttgtcatctatagcagagagtgttttcacgatcttccgttgaacatctaagacaggatatacaatttcaacctctcctaatagcttggtattgatagacggcattgttgctccaacagctatattacgtacaaattgttttgttttttccaaacagaagaaatagtagaggaataatggatctatcacaccggttggacgaactcgcagacaacgtccggaaaacatccatccgtcatgaacttcatcaacataagagcatctatcaaccgatcctactcgactgaacactatgtcaccttttgagagaacatattttgcaagacgaactttatcttcatctgatactttagggagattttgtttcgtaaaaactctattacctaaatgttccaccgtaacaatgggagtaccatcatttacatagtcctctttatgtagttgaataccaaaagggcctgtttgtatatctgctatatttctaagatattgcctattcatagttctctatcctatctgatgtattttctatgtatcagctttacgttcttttaactacatcacccagccggataattttccactctttcatactcatcttctttaatctaaaacttcccaatatcctgatttgttggcaccgacgcgcctgatgatgtttttctccctgagggaagccacgactcgttccgcctgacgttgggaaagttccagccgttcggccatttcccgcacgctgagccggggctgtcttttgatgagttccacaaggtgttgttgcgccggtgtaagatttataccgacatttataccgacatttataccgacatcttcatgcgggttgcggtgttgttggagggtgttgagtatttcccggagcatgaattccacgaaaggggcgcaatccgcccgggcggagctggcgctgatggcttcatagtaggcttgctggttggcataaaccatgttttctacggggaggtgttcaaaggccgggtgcagttttcccaggatcagggattgccagagcctgcccattctgccgttgccgtcgctgaagggatggatgaattcaaattcataatgaaaaacgcagctgcgtatcagcagatggtcttcagcccggcgcagccattcaaacaggtcgttcatcagcccgggaacacggtcggcgggcggggccatgtgcaccaggcgcgttccggcaaaaacgcctacgccgccccgcctgaagcttccggcgtcatccgccagagcgctcatcatcacgccatgggcttggagcagatcgtccagggaaaaggcgtccagggagggatacagttcataggttttaatggcgtttcttacctcctggatttcccggagcggagccatgaccggtttcccctggagcacgtcgcgcacctcatgttctgacaaccggttgccttcaagagccaacgaactgtggatggtcttgatgcggctggctttgcgcaggcgaaggccgccgctctgctccagcctgatggcataccgttccaccagagcggatatttccgcaatcaggttgacggcggcggatgatatgctgaatggcggctggtacatcagggaaagatggcgttgtttatcaattattccgggaatgggaacggacagtcggcggctcgatttggcacggttaaggagccttatggaaggctctcctgccatgaagcaccctaccccaggaacttgcggtgggcaagtttaacattgctttgcttgaccatggcgtattgaagggtggtgtctattctctggtgccccagaagacgctgcaattgttccacgggcattcccttgtcaatcgccacggtggcgagcgttctgcggaatttgtgggggtgtacccgcggcagttccagacggcgccccaattcccgaagccgggattccacgccgccgattttcaaacgttcataaggcgctttgagagacacgaacagggcgtgattgccgtcttcccgctcttccagatagttctgcaaatggatcttggtgcgggcgtcaaaataaaccatgcgttccttgctgcccttgccgaagaccacgcactcccgttcttcaaaattgatgtcttcacggttaagcagcaccagttcccccacgcgcattcccgtggatgccagaagatctatcagggcgagatccctcaatgtttcgcagttgtcgcgcatggtttccagagcttcatccgtataggtttccttgatggttgaggcggtttttaccttgtggatacggcgcaccggacttttcagaataaagtcttcatcttccagccacgcgaagaagctggaaagaatgcggcggatgttgtcaatcgtcacgcggcttgacttcctgtccgcctgatacctggtgagataggagcgcaaatcctccgtctggatgcgggagatgcccttccccacgccgtcaagcatgacttctatcgtccggcggtaataatccagcgttttttccgaacagccctcaatgcgtttcgcggaaataaaggcatggacgacgcctctgttgtcctccgccatgcgttcctcgtccccgcgccccttttgaacatcgtagcattcaagatggtgtttcaatacttttttcaattgcttcgcctggctgttatccaaatgcggaagcatctcccggacgacgtcgtctatcaattcatctttcataacccaatttccgctgtatttatgggagaacacggctgagggcaatacccgcaataatctaaacaggccaatcattgatccggctaaatgataatttagcggcttagattttgacggaggaaacatcaatctcgccggtcatcaaacgtggtaggagattatctctaaagacttgcaggcgatagttttcttggacgcgttgctctattgcgtgatttattgtggaaaaagtgtcgataatttcatatttatcaagttctctcggggccaaaaatgagaaattctcaagattccctttcgtaataaacctaattacagaccccctcgccgcacttgtgatcttagcgagattgtatttgacggcataatatagccaactggaataccttggattatatggaataagaacatatgtcctttggtacgcttcaaatttaccgttataccatttgacattgaagtcaccattcccagcaaccaatatggcattgccttcaaaggagtaattgtcagtccacgcaatgttttgggagcaactgaaaaacgggtattgaccactatccgatgatacattggcattttttttacctgtaactacaggaaagaagtctgccaaacggtattccttccatgttgatggaattttaccattgaatggctcatagtcgataaaccaagatttgaatatagcctgtgcctgctgctctaaattatcatttagccggatcaatgattggcctgttcagcctcttctcgtctcaatttgttaacaacatatcaatatcataacaaccaatatttcaagatccctccccatcacaaaatgattgattttcaacagagagttgtataattacattcatcatcaaccttgaagcacgcattcagatggcaggagcatacacggaagacagctatgaaaagtctgtagtggaactattccagaacatgggctacacccacgtttacgggcccgatgtggagcgagactatcaccttcccttttatgaagatgaattgaaaagcgccattttccacttaaaccccgctttgccggaagaggctgtgacggaagcgctcaacaaattaaaaaatattgataatggagagcttgtacagcgaaatgccgtgtttatgaactatcttcaaaacggaatttccgtacaataccgcgacaagggcgaagtgcgttccgacattgtctacctggcggattacaataatccggacaataattcctttgttgtggccaatcaatggacattcatggaaaacagctgcaagaggccggacatgattctgttcctgaacggcctgcctgtcgtgcttgttgagttgaaatctccttcccgggaagagacggacgcttccgaagcctaccggcagctccgcaattacatgaaggaaattccctccatgtttgtttacaacgccatttgcgtgatgagcgaccaaatgacttccaaggccggaaccatcacctccggagaagaccgtttcatggaatggaaaacggtagacggcagttatgaaaataccaggttcgcccagtttgacacctttttcgagggactgttccggaaacaacgcctgctggatattcttaaaaactttatctgtttttccaataacggaaaagagaccgtgaaaatactggcgggctaccaccagtattttgccgttaaaaaagccattgaatctacccggaacgccactcttaccgacggcaagggcggagtattctggcatacgcaggggagcggcaaatcactgtccatggtcttttacgcccacctcctgcaagaggctctggaaagcccgaccatcgttgttcttaccgacaggaacgacctggacgaccagttatacgggcaatttgccaaatgcaagggcttcctgaggcaggaacccatccgggcagaaagcagggaacacctgaaaaaacttttacaggggaggaaagccaacgggattttctttaccaccatgcagaagtttgaggaatcccatgaggctctttccgaacgcagaaacatcatcgtcatggcggatgaggcccaccgtgggcaatacgggctggcggaaaagatcaggatttccacaaatgaagaaggcgagaaaattgccaaaagagttgtcggcacggcgcgcatcatccgcaacagcctgccgaatgccacctatatcggctttacgggaactcccgtctccaccaaagacagaagcacccgcgaagtgttcggggactacattgacgtctatgacatgactcaggcggttgaggacggagccacccgcccggtttactatgaaagccgggtgatcaaactgaatctggatcaggaaaccctgaagcggattgatgacgaatacgagctcatggccgccaacgccgacccggacgtgattgaacgcagcaagcggcagctggggcaaatggaagccattctgggcaatgacaacaccattgattcccttgtccgcgacattctggaccactatgagcattaccgggaaggcctgctgacgggcaaggccatgattgtggcttattcccgccccatcgccatgaaaatttaccggcgcatgctggaattgcgcccggaatggacagaaaaggcaaaggtggtgatgacttccggaaataatgatccggaagaatggagggaaatcatcggcaacaagagctacaaaaatgaattggccagggagttcaaggataatgacagcccgatgaaaatcgccattgtggtggatatgtggctgaccgggtttgacgttccctccctggcgaccatgtatgtctacaagccgatgagcggccataacctcatgcaggccattgcccgcgtcaaccgcgtgttcggcgacaaggaaggagggctggtggtggattatgtgggcatcgcttccgccctgaagcaggcgatgaatgattacacaggccgggataaagccaactacggagataccgacgtggccaaagcggcccatcccaagtttctggaaaaactcagcatctgccgggatctgttccatggatttgactattccggattcacgacgggtactgatcttgaacgtgccagatgcatcagcggagcggttaattttatcattggcagggataaggaaaagaaacaggaatgtttcctcagggaagcgctgatgctgcgccaggccctgtccctgtgcgcctccatcacccaggaaaccgaccgtttcgaagccgccttctttgagtccgtccgggttctggtgcaaaggctcagaagcgcgggtgccgggaagaaaatttccctgaaggagatgaacgacagaattaacgcactgttaaaacaaagcatccggagcgaaggcgtcatcaatttattttccgatgtttccagggagttttctctttttgatccaacgtttcttgaggaaattgcgaggatgaaggaaaagaaccttgccctggaattgcttaaaaagctgattctggaacaagtctccatttacaagaggaccaacatcgtcaagtcggaaaaattcagcgagaagatgcaacggctgattaattcctacatcaatgggttaattaccaatgaagaagtcattgcggagatgctgaaactcgcgaaacagatggcggaagcccgcaaggaaggaagaaatcatggcctttcccccgaagaagaagctttctacgacgcgctgaacaggccgcaggccgttaaggatttctataagaatgacgagctgatcgccatgagcagggaattaacggaggctctgcgcagaaacagcaccatcgactggcaaaaacgcactcaggcgcgggcaaaaatgcgcaccatgatcaaacgtcttttgaaaaaatacaagtacccgcccgatgatgtgccggaggctcttcaaaccgtcatgagccagtgtgagctgtgggcggataatatcatggatgtcaggaaaaagagttatttgaatgattcttccggggatgagggagccctcagagcagcggaagatccggaacaatacggggtcagcagctgatcatggcaagatgctcaaccagggaagggtaatggaatccgcatctgcctgttccggacatcgccggagaggcatattccctccgttcggattttttctcttgccagactgcgccccgtgtggtttactgcgccccgcaacggcagaaacgcctgagcagacagccccatagtgtaattggtaacacacctgattttggttcagtatttctaggttcgagtcctggtggggctgccaatccaaccctccttcaaggagggttttttgttgccttttttcaggattcatcctctcccggagcaagcttgaacgccattcccccatcatccgcacagattcttgaaaatccagcaatcgtcctgccgcgcatggaacatgcgggggtggagggaaatgccggaaagaagggtattccatgagcatcgcacacacggcatcccgggacggtaaaagctcttgcgttacagggatttttttgcataatcccccggcaggaatgacggaaaaacctatacaacttgggcttgccgggctgggaacggtcggttccggcgtttatgaaacgctgtgccgcaatcacgcccttctggaagcccggagcaagattcctttcaggctcaagcgcatcgccgtgcgcaacctggaaaagcccagggaaaccgtcgttccccgggaactgctgacggatgactggcaggatttggtaaacgacccggagatagacatcattattgagctgattggcggaacgcgccaggcttacgacctggtgacgctggccctccgtgccggcaagcccgtcgttacggggaacaaggctcttctggccgagtacggagcggagattttcaagctttccgcggaaatgggcacccccatttatttcgaagcgtccgccggcggcggcatccccattatccagagcttgcagaattccctgatttgcaaccacatcaattccattgtgggcattatcaacggaacgtccaactatattctctccgccatgggggaacacggggccgattacgcggacgccctggcccaggcccagaagctgggcttcgcggaagaagacccctccctggacgtcaacggctgggacgccgcccataaggcgctcatcctggcgatgctggcctacggaacaaccatttccccggataaaatttacgtcagaggcattgagaatatcaccagccgggatttcgagtttgccaaaaaactgggctataccatcaagctccttgtcgtcatccgctaccatgaggggcaggaagacgctctggaactgcgtgtccagccctgttttgtccatgactggcatatcctggcttccgtgaacggcgtgttcaacgccatttccgtcaacggggacattgtgggggaaacgctgttttacggccgcggagcgggcaagaaccccaccgcttccgccgtcatcagcgacatcatcaccgccatgcgcgaaagccgctatccggaataccatacgggcttcaatccctatgccaaggcctgcgggatcatgcatatcaatgatacggtcactccgtattacgtccgcttccaggtagcggaccagccgggagtcattgcggaaatagcccgcattctggccaccttcggcatcggcatttccgccacctcttccgctcccagccatattgatgaaggcggagccccctggaacgacctcgttttcatcctccattcctgcccgtggggccagctccagaaggctctggaggaaataacccgcatttcctgcgtggcggcggagccccgcgtcctgcgcatagaacatcttcttcctcaatcctaacctacatatcatcctgttacatggctcttatcgttcaaaaattcgggggcagctccgtcggcaccattgaccgcatccgcaatgtagcgcgccgcatccatgaaaccgccagggaaggcaaccaggtggtcgccgtcgtttccgccatgagcggcgtgacggacaagctgatcgggcttgccagggaattgtctgaaacgccttgcgaacgtgaacttgacgtgctgatggccaccggcgaacagcagtccatcgccctgctctgcatggccctgcatgaactgggtgaaaaagccatgtcctttacgggggcgcaggccggaatcaccaccttcggcagccacacgcgggggcgcatccacagcattgacccaacgctgatgaacaagtacctgcaggaaggcaacatccttatctgcgccggctttcagggggttacggaagaaggaatggtccagacgctgggccgcggaggttccgacctctccgccatcgccatcgcggccgctctgaaagcggacgtgtgccagatttttacagatgtggacggcgtctatacctgtgacccccgcgtggtcaaagacgccaagaagatacaaaccctttcatatgacgagatgctggaaatggcttccaacgggtccaaggtgatgcagtcgcgttccgtggaattcgccaaaaaattcggtgtcgtctttgaagttcgcaactccatgaacaacaaccccggtacaatcgtgcaagaagaaaccccctccatggaagccgtcgtcatccgaggcatttccattgaccgcaaccaggcccgcgtcaccattaccggcattccggaccaaatcggctacacggcccagatactgggcgccctggcagaagcggaaatcaacctggatatgattctggccaatactgcccacgacggctatgtccgccagtcctttacgatgccctccaacgaactgggccgcgcccaggccgcccttaaaccggtcatggccgccctcggctccaccgtcaaggtggaaacggaagcggggctggccaagctctccctggtcggcatcggcatgcgttcccactcgggcgtgggagccaccgctttcaaggccctggcggacgccaacatcaagaccggcatgatttccacctcggaaatcaagattgccgtgatggtggacgaatccgatattgaggaagcagcccgggtagtacataaggcgttcaacctgggagcctgattttttcagtctttatcaattcttttttccgcgccggttcacgttcccgtgaaccggctttttcatgcggcaaaaaaagcagccccttcccggaagaggaacgccatccccccgtttcctgccaattcccgaatgaaggaagggagtctctctccgcatgctgttgcgggcggaatggccgtcacaggaacacaggagaatgatgccgccctttccctgttccggttttaccggcttgccgcctgcgttttttcagcgttcacataaaatccatacctccaggaacggaaattctccggttctccacgcaggaaagggaagtccttacgggtacggagcaaaaaaggcacaacaaacaaaaggttcatttacagggaatcaaccgccccccgcaccgcgcagaggctgccacagccaatcccttttattgcacccgtatcgtctgctcaatcagttcgttcaggcgcggcgcagtaatgccgccaaccatatccttcagcttcatcccttccagatacagaaccgtcagagggacggcttccaggccatatttgcgagctatgtccggataggcatccgcatcaatcagcacggcaaacgccttgccgtcctgcgattcggcataagattttaccgcctggacgtaatccatggccgggcggctccacgaagcgtaaaaaacaaggagcaccttgcggccggataattccgtaagctgccgcatgtcctcacccttgtaatccatccatacgggggcctttttcttaggttttgaaggagggaggacttttttgggagggtcaaacgtcctttccagagggcgcggagcgggctttttttccgcataacgggcgcgccgttcactggaatcgtcgcacccggtcaggccggccgccagcaaaccgcagaccaatatgaacaaaccctgtttcatccgcaggcaagtatgcccggagaaggcgaatttgcaagcctgaaacccataccgcttttcgcgttgcccctcccccttctttctgttatggtgaaggttgcatgaatggcgtccctccactggaattcgcaggggtttcccactgggcggccctggccgtcctcctggcggcgggagcctgcatcctggagctggggcagtcctacaaaaaaaccgtcagaaaccgcactaccttctggctgggggcggcctgcctgttcagcctggttcccgacctggccgccatgctggccgatgaaccggaaaagaactggacatggatgctccccctgcatttctgctccgtcatgcaggtggtgtgcgccctgagcctgtggataccctcccggcggctacgctccgtggcctattactgcgtgctgtgcgccaccctccaggggctggtgactccttccgtggcccatgatttcccctcatggacgtattttgcctttttcctttcccacggcgtgacagtcatcacggcgctttacctgcctctggctctggaatggaagccggcgcgctgggacttcctgtgggcttttttgctggcgaatgcgtacctggtggccattcatcccgtcaacatgctcctgggaaccaattacgggtttaccgtggccactcccgccggagggtccgtgctggactttctcgggccatggccctggtacctgctgtggatgcaggttccggcgctggcgctgatgtatctgctcacgctccccttccgccgttatcccaggggccgcacgggcagttccctgttccgccattgaaagggaatctttcttcccagccccgccgcttccgacggaatccccgcaaaacggcccgcccgcttccggaaaaaaagagccccggaaagttctttattgtataatcggcttgaggatgccgatgtaggtgtccgatgtccctgttccgcgataaatggaattaatcctgattttaatggtgtgcacaggctgcctgtaatacggaggcacgacaatctgcggagtccagtcatcccgcagcgtggcgtcaaaagtataagtcccgttcagcgttacctgaatgcctttggggcggctgaacatggagtaggcaatattcgggtgcctccgggcttccgaatccttttccgggtcggtcaccggggaaatgccggtctccagcatgattcccagcagccggccgggtttcctgagcctgatttccagggtttccccctggccgtccccggaaacgctttccgcccaataaccggaactttttttcagattgtccggggaacatggaaccccgtaggggtccctgtccagggtggagctggcagtcacgtcatactggtccgtcaggacgcccttttctccgcggacggtcatccgcccatccttgtccagcacccacccgggccccggagtaagcaccaaggagggagcgtagggcctgccgtccgctcccaacagagaccaggtataaacgcctttgggcgtcgtcacgatggatttggcatccgcatagggatccagcttgacggactggttggtcatctccgagctgtacacattgaccaccgccctgggggtgccccctgtccaggtcattaccggagaggtaagcagcgtcaggcgcggttcccccatgtggaccttcggttccggcgtaatggcaacgtcctgcgtataaggaacggagaactggaaggtaagaacatggattcccgccttgttgggaacctgggccaccagccagtgagttatgccggcaatgggaaacatggagggagcgtccgcctggagatgccgcccctccaccagggaaaaatcacatttcagatcatccacggatgtgacgacgtcctgcaccgctttcgtaaaagggaggctgcgtatgggttcctgcctggcggcattggcctgttcatcaggcggttcgtactggaacggcacgcctacggaaatggttttccccctgattcccctggggatatccagcgcgcaggtgtaaatgaggaaggcctggtgctgcttcagggaaacagtaacgtccagcgcgttcagccggattccgtccgcctgcgtcaaatccatgggaacgggcaagccgggaaccggagcgatgcattgaaaggatatctcctgctggcgggggcggtccgctttttccgcggcggtctgttccttctgctggggttcggcggccatgcccggcacgcagcatgcaatgccggccagccagatcagggtagccaatctcatggccgttagattaacgcgtggcagcccgttcatcaagtccatttaggggagggggaaaggtcccttcgtacccgcccttttccctgaacaaacaagggcggccctcctttgaaccagcgacgcccgcagcaggaaaacattcgttccaaactccggaattggtcgcttcatgcccttggaagcgggttccggggttccgcctggacgtctctctgccggagaagcggaaagatggcccatggcacatgacaggtaaaaaccaactgaggggcatcggagggccttttccgccacaaaccagcataattaactcattaacaacaatcggcatccattgttgcatatttgcagaaagaccgtgttcttccgctttccaggcgcctttaacgtactcttattaccagggtttttcatgaaaagcccgtttccgggggagagccaaaacgcccagccgcccccccttcgccaaacaaaaaagaagcatgcggaagacagaaaaaatcacgcaagacaggagaattttttctagaaaacagaacaaataatacaatatatagtgtatataaaaaaatactgtacaatatttccttttcatcaggattatttttcagtagataatgcacacgctacgcgccgccgccccatgacgaagcgcaaaagcctacgggattattcccaaacctttctacttcgcaatccaatgatcacagacaactcgcaaaccatactcaaactgcgtacaggccaggaaatcatcctcccccagaggaaagacctgctgggcggtttgaaattcaccagaagattttcacacaatgaagtccacccctataatgaagtggactggacacgccgcgacgtccgcattatggattggaaaaccggcaagaccatttacgagcgcctgggtctggaagctccggcccactgggatgacaacgccgtcaaaatcacggcggacaagtaccttttcggcagtgaacccggctccctagaatatgaagacagcttccgcaatatctacgaccgcatttccaatacctataccgtatggggatgggaggaaggctacttcgccacgctggaggacgcggaaattttcaatgaggaaatcaaggccatgctggtgcagcagatatgggcgcccaactcccccgtctggttcaacatcggccactgggagcagtggcgctggggacgcccggacctgagggaaaactatacaggccacggcaacaaggcctaccataccaaagggaccaagaacaatctgaaaaccttcatggtccagtctacgtatgaatacccccagtgttccgcctgcttcctgacggaagtgggagacagcatggaggatattctggaccacctgacgacggaaggccgtattttcgcgtccggttccggagtaggcatcaacctgtccaccctccggtcctctaaggagcccatcagcggcaagggccgctcctccggccccatctctttcgaccgcggctgggaccgcatggccggagccatcaaatccggaggcaagacgcgccgcgccgcacgcatggtcctgatgttcagcgaccacccggatattttcggattcatcaatacgaaaaaccgccaggaagacatcgccaaggttatcctgcgcgaacacaacgtgcatgtggagctcaagcagattgcggagaccaagctggttgccggcactccggcggaaaaggccgccgcccgcgtcattctttcccttcccctggccacccggaacagttttgacccgcacatggacgccctgctgtacggggaaacgctttcccaccagaacgcgaaccattccgtttccctgaagggggatttctggcaggcgctcgccaataacggcaatacctacacgcgctgggtcacgaatccggcccacatcgaacagacgttccgcgcccaggaacttctggaagccatggcccagtccatctgggacaacggggaacccggcgtgcacaataacgacgtgatcaacctgtggaatcccgtcaaatccatcggcaccatcactacgtccaatccctgctcggaatacgtcttcctgaacaatacgagctgcaacctttcctccttcaacgcctatcgcttcctgatcaagggagaggacggcaagcccgtttttgatgcggacgccctgacccacgccgcccgcctggccatggtctgcgcggatctgaatgtggaacgcggcggcttcccgattgaagaaatcgcggagggcacctacaagtaccgcaccacgggcatcggcttcgccaacgtgggcggctccctgatggccctgggcgtgccttacgattccgacgaaggccgctggattgcctcccagctttgcagcgccctgacggcggcctgctggacggcctccgcggaaatgggcgcggaactgggttcctacgtggaataccccgccagcaagaaagacctgctcgccgtgctgcgcctgcacaacgcagcccagaaactggcaagcgccctgccctcccagaaggactccaagacgctggacgacctgattgagaacatcatcgccaatgccggagggatcctgccggaagcgcaggggctcaccgcctcctatgccctgcatgcctacctcaagagcttcaaggcccccaccatgatgaacagggagcgcatcgcccctgcggccaagctggcggaagccgcttccgacatgtgggcgaaggtgatcaaggccacggcgcaccgcaacgcgtttgtttccgtgatggcacccacgggcaccatttccgccccgctgggctgctatgatgaaggcaccacttccattgagccggattacacgctggtgaaatggaagcagctggcgggcggaggctccctgaagatgttcaaccgcctggccctggaaggcctccgctccctgggttacccggaagacttcgtcaatgaagccgctctggaagtggcgggcctggacggcctgatttccgcgttccaggggaatatggattacgtcgtgaaccagctcattgtggacccctgcaatgaccaggccggccccgtgcgcctcgcgtggcgccgcctgctctccggaacggaatcccgcagtgaaattcaggaaaaagtggcttatatcagcaacccggccaacatggccgtgctgacggcggatgaactcgccgtagtcaacggagccgcccatattgaatccataccgtggctgaataagaaggacctgccggtctttgactgcgctgccaccaacggcaacggcatccgtgccatttcccccgccggccatgtgctgatgctgggcgccctccagcccttcatctccggcgcgtgctccaagacggtcaacatgcccgtctccgccagcgtgcaggatatttacgattccctcatcatgtcccacgagctgggtgtgaagtgcatcgccatcttccgcgccggctccaaggcgaatgccgtttacgtggtggataccccggaaacgcgcatgttcaaggccaaccacgtctgggaacagctggtgaatgccggatcggacgccattgacgaaatcatcgcggaggcatccaagccgcgccagcgcaagctgcccggccgccgtctgggccagaccgtaaaattctccgtaggcggccagctgacgggctacctgacggtaggcgtctatgcggacggcacctgcggggaagttttcggacgcctgggacaagtcggctccttcgcctccggcatgtttgaagcttactgcaagctcctctccaccgcccttcagttcggcgtgcctctcaaggaagtggtcaagggtttccgcaattactccttcgagccctccgggttctgccgcgtgggggacgacacggaggcggacacctgcacggaaatccgctcctgcgcttccgtggtggatctgattgccaagattctggcgtggcttttcccggaaagcaacggctaccgcctgcgggacgtcttctccatccccagcgtcagccttccgggccaggctccggatacgacggtaagcgtgctgcccccccgcatcatcaccgctccggcgcatcccgctactccggccctgccggaaattcccgccggaaaggttccggaaggaacgatgctcaacggcgcctccctctgcccgcagtgccactccctggcctatgtccaggacggcaaatgcaaatcctgccgctcctgcggatacaaggacggcggctgcggggaataaacggtaaccagatcattccatacccgctctttccaggcggaacccggcagccgccgggttccgcctggtgaatttacggagaaggcattctttccgggaaagaaggttttccggccccctcccggcatgaactttccggaaagaagcgaacggaaactgccgcgcgggaaaaggaatgataggcgtttgccttgaaatccggcagcatttcattcatagtccggcgcgtacgcctgaagccgttcccacattttccatgaaaccctactataccctggccgatcttctggatgaagaacatccgtttgatgccggggaaaccgttcccgccagactggccgtaatcggttttcccattgcccattccaaatcccccgccatgcagcaggccgcgctggatgcggcgggcattcgcgcccggtatatccgcatccaggccgctccggaagaattcggggaggtggtgcggctcctcaggaaaaggggattcacgggggccaacgttacggttccccacaagcaggcggcctgttccctgtgcagtgacacagacgccctttcccgcgctaccggctccgtcaatactcttgttttccaacaggacggttccgtctccggattcaatacggacggcccggggttcgcccgcgccatccgggaggaattttccgtggatttgcgcgatttgaaagtggcccttctgggctcctgcggcggggccgggcttgccctggcctacacctgcgccatgcagcgttgcgaacggctgacgctggccggaagatcggaagaaaagcttcaggagcttaaaaacaggctgagttcctttttcattgacgaacacaggctggaaggggcctccgaccgcctggcggcccaccagaacaatacgccccgtttcaatgccgccgtggaggaagcggacctgatcgtcaacgccacctccctcggcctgaagcctacggacccttcccccgtcccccctgcactgctttccgcccaccatctggtttatgatttacagacgcatgacgatgccttccagatggaagcccgctttcagggcgccagagtttccaacggcctttccatgctggttcaccagggggccctttcctttgaacgctggttcggcatcaagccggatatttccgccatgcgccaggctcttgaacaaaagcatgactgacggcaccccccattttaacatccatgctttccggaacgcgctggtagaatggttcaggcgcgaagggagggattacccgtggcggcggacaacggatccgtggcacatccttgtttccgagctgatgctgcagcagactaccattcccaccgttttgggaagatatgacagatggatgcgccagttccccactccggcgcatctggctgccgtggacgaacagacggccctgcgctcctgggaagggttgggctattaccgccgcgtgcgttccctccaggccatcgccagggaaatcgtcaacgaattcggagggcggttcccggacaatgcggaagggctgaaacgcctgccgggcatcggcccctacacgtcgggagcgctcctctccttcgccttcaacaaggcggctcccattgtagacgccaatgtcgcgcgcgtcctggcccgcattgacaattattccgttcccgtggattccacggaaggccagaaatacctgtggagccgcgcggaaagcctggtggatccggaacatgcccgtgaattcaattcagccatcatggaacttgggcaaacctgctgcagcatcagttctccggactgcctgctgtgccccgtgcgccccttctgctctgcggaacggccggaaacgcttcccgtcaaaaatcccaagcctcaagtcacccgggtggaacaccacgatattctttacatccgcggcaaatccgtcctgctggccaaatgcccggaaggcaagcgccatgccggcatgtaccgcttcccccagagggaggacgagtacaccctttccctgccccatgtcctgaaacaaacctacagcattacccgctacagggtgacccgctacatccaccatgtgacggatacgcctctcctcagggaaggagaggaattcgtgccgttggacaaaatccacgggctgcccatggcctcaccggaccgcaaggcactgaactcccccaccctcggcaaactgctggaccatatcagatgaatgacagattgacgccggaacttgtcctctccgcctattgccaggggtgttttcccatggcggacccggaaacgggagaaatctccttttacgaaccggacccgcgcgccctgattccgctggacgaccgcttccacatcccccacggcctcaaacgggctttgaataaaaaaccctttgaactccggatggataccgcttttccggaggtggtccatgcctgcgcccggacggaccagccggaagaacaatggatagacggacagattgaagaagcatacggcaagcttcacgagatgggcttcgcccacagtgtggaatgctgggacgaggaagggctacagggaggactgtacggagtagccctggggaaggcttttttcggggaaagcatgttccaccggaaaacggacgccagcaagatcgccctggtggccctggtgcaatacctgcgggcgcatcggttcctttttctggatacccagtggactacgccgcatctgctgaaattcggaacctatgaagtgccggccaaggaataccggaagcttctgaagagggcgctggaggaacaataaactatattttactgtccggtgtaaacggtcatgagattgattcccaattatgggagatccgacagcgcaccggatttcataacctgctgatgatttttcttcgggctttgccatcaatacttgccccccatgccaccccttacgaccaaacgttcaggaagcatggctccggcataaaaaactccggaatcgacatcaacggcactccgggaaagactgcggagtattttgggaaagatgcacttcctcttccgccaggagagcttcggcccatgatgccattaacatgattttttgcagcaaggcggaagccgtcaaacatgcccaaaccaaacgcatggagcagtttggcccgcaaggttcaagccatatctgacaagaccgttccatccgctaaaacagcccgtggttccgaagaaccacgggctgtttattaacccttaacaaaaaggtttattcctgttccagagcagcctgggccgcggccagacgggcggtcgggacgcggtagggcgagcagctcacataagtcaggcccagcgtgttgcagaacttgacggaagcggggtcgccgccgtgttcgccgcagatgcccagtttgatgtccgggcgggtggagcggccgagttccacggcaatcttcatcagcttgccgacgccgttctggtcaatggaagcgaagacgttcttcttgatgatttccagttcctggtactgcggcaggaaggagccggagtcgtcgcggctcatgcccaggcccgtctgggtcaggtcattggtgccgaaggagaagaactgggcggtttccgcgatttcgtcagccgtgacggcagcgcgcgggatttcaatcatggtgccgacgaggtagtccactttgacgcctttttcctcaaatacctgctgggccaccttgtcaatgatggctttctggatgtccagttccttcttgaaggccaccagaggaaccatgatttcaggcaccacggcaaatccttcttcctgggagacttccacagcggcttcaaagatggcgcgggcctgcatttccgtgatttccggataggcgatgccgagacggcagccgcggtggccgagcatcgggttgaactcatggagttcggacacgcggcgcatgataacttccacaggcatgccgattttctgggccaggtcaagctgctgttccttcgtctggggaaggaattcgtgcaggggcgggtccagaaggcggatggtgcccggcaggcccttgagcgccttgaagatgcccttgaagtcccccttctggtagggaaggagcttggaaacggcggctacgcggtcgctcttcttggtggagaggatcatttcacggacgaagtcgatccggtccccttcaaagaacatgtgttccgtgcggcagaggccgatgccggtggcgccgaaggcgatggcggtttccgtctgcttgggagagtccgcattggtgcgcactttcattttggtgcagtcgtcgcaccactgcatgagcttggcgaagttctggtaggtgcggctgtcttccggcttcatggtcttggaaatcaggacctggatgatttcagagggggaagtttccaccttgccggcgtataccaggccgctcgttccgtcaatggagaggtagtcaccttcgctgatggttacgtcgccaacggaaacggtgcggttgttgtagtccacaatgatttcatccgcgccgcaaacgcagactttgcccatctggcgggcaacgagggcggcatgggaggaaacgccgccgcgggcggtcaggatgccttcagcggcaatcatgccgcgcaggtcttccggagaggtttccagacggaccagcagaaccttttcacctctgtccgcggcttccacacagcgttccgcgttcaggtagatgcgtccggtggcggcgccgggcccggcgggaagaccgcgggtcagaaccttggcactcttgatggcttcacggtcaaagatgggggtcagcagctggtccacctggtccgcaggaatgcggcgcacggcggttttccagtcaatcaggccctgttccaccatttcacaggcaatgcggaaagcggccacgccggtgcgctttccgttgcgggtctggagcatgtaaacggtgcggtcctgaatggtgaattcaaagtcctgcatgtcatggaagtggttttccagcacttcgcgaatgcgcaccagttcattgaaggcggcgggcatcacttcatgaagggcagcaacgggggcgggcgtacgcacgccggccacgacgtcttcaccctgggcgttcatcaggaattcgccatagaattcgttttcgccggaggcggggttgcgggtgaacgccacgccggaaccggattcctcacccgtgttgccgaagaccatggcctgcacgttgacagcggtgccccattcggacggaatgccgtatttctggcggtacacgatggcgcggtcattgttccaggaaccgaacacggcgccaatggctccctgaagctgttcccaggggcattccgggaattcatggccggtgcgttccagcaccagggccttgaagcgggagacaagttccttcaggtcatcggcggagagcttggtgtcttccacgtcctcgctgccgaagcgttctttcttgatggcggcgatggcggtttcaaagggttcgtggtcttcatccggggttttctgcacacccagcaccacgtcgccgtacatctgcacgaagcggcggtagcagtcccaggcgaagcgggggttgttcgtagccttcaccatggcttccacggatttttcattcaggccaaggttcaaaatcgtgtccatcatgccgggcatggattcacgggcgccggaacgcacggccaccagcaggggcatagcttccgtatcgccgaacttgcgtcccaggatctgttccattttggcaatgccttccttgacctgcgcgtcaagctgggcgggataagtgcagccgtgatcgtagtagtaagtgcaaacctccgtagtgatggtgaatccgggagggacaggaaggccgatgcgggccatttccgcaaggttggcgcccttgccgcccaaaagatttttcatgctgccattgccgtcggcggaccctccgccgaaagaatagacgaatttgtcagtagatgcgctgcacgcgcaggaattggtggacatatcgattattgtagtcgaattaatgattctgcccaaacatcgaccaaaggagccaacaaaagacccaatagcgagttagggtcgaataaggatgccttcggctccttgctttgtcaattcgaaattgtacggaaaacaaaaatatttttcagagtttttggggaaaagaatgcatgccaaaaccctgcttttccagcctgtcccgtccggagccgctcttcctccgggcaacgccgcttcctgttttccggcggccccgaaattacctgggaagaaaagcgcagcgagtttcttttcatggctgtccggaaaagaaaaacggacgcttatcaaccggataagcgtccgccggaaataatatgccctgttttttatgccttgcagaaggtatcttcatccgcacagtcagcctgaacccacttgacggaggaatcaccggaagctatatgcacgaggcaatggtacacggcttcctggtccgcatccagccgggcagccatctgggcggcggtttccggggcggttcccagagccccccttaccctgcccagcagggccaggaaggaacccgccgcttttttgccggcttccacgccgggctggtggtaggcgttgatgttgaccagggaagcatagaaggagacggcgcgctcaaacagggcaatcagcatgccaagcgttttggcgttcacctccgggatggaaatggtgatggaggaacgtccggattccgccagagcctggcgggtgccgcgcaggaagccctggaggaagtctccgcaggtggcgcccgcttccacttccaccgcatccgcggaacattcgcgcacttcaatgaaggtggcgaagaagttgttcacgccgtcacggagctgctgcacataggcatgctggtccgtggagcccttgttgccgtacacggaaatgccctggcagacttcgttgccctccaggtccagccgcttgccgagggattccataatgagctgctggaggtatttggagaagagcaccagggcatccttataagggagaaccaccatatccttttcccccttgccgccggtggccttgtaccaggccagcgccagtttcatggaggcgttgcatttcacgcagtcccggcgggtcttttcgtccatcaggcgcgcgccttccagcaggtcatccacgttcacgccctgaagcacggcgggaaccagccctaccacggacatgacggaggtgcggccgcccacccagtcttccatcgggaaacgcctgagccagccttccgcctcagccgttttgtccagccgggaacccgttcccgtgacggcgaccgcctggggtgcgaattccagcccgttcttcctgaagaagtcctgggccaccagcatgccgttgcgggtttccggcgtgccgccggatttggaaatgacaatgacaagcgtttcttccagagggagggattccagcacccggtacatgccgtccggatccgtgttgtccagaaagaacatgtccagccctgccgccggaatggcatccgccaccagctccgggccaagagcggaaccgccgatgccgatgacgagggcggcggaatattgttccgcgcggggaggcgttattttgccgtccagaacgtcccgtccgaaggctttgacgtccgccagggggccgtcaatggcggctttcaactccggcgtgggagccagggaggagttgcgcagccagtagtgccccaccatgcgtttttcatccggattggcgatggcgccggattccagcgccttcatgtcggcaaacgccctgtctatccgtccctgcatggaagacaggaatgcgtcgtccagcggaagttttgaaaaatcaagggaaatgcccagttcagggtagcgaacgagttgttgtgcgtataagctcatgatggtcatggattgaaaaaagggttaccggagttttttcaggatgcttttggcctgcacgtcgccctggtccgccgctttctggaaccattcccgggctttggccatgtccttgggcaggccgaaaccggtctgatacatcacgcccaggttgtattgctccgaggcatagccttccgcagccgcccggcggcgcgtgcgggactgttccctggcttccgcagcggtaaggcccagaacccgcgccgcgtccggccacgcggctccgaatctggaagcggaaggggcatagccggcggttccggccttgcggtgcatttcctccgcttttttcttatccctcttcacgccgtatttgccctggtcatacaggaacgccatgccccagtagccacgggggcagcccagctccgccgcctgctggaagcattcaaaggcatctttatattttttggaacccatggcgcgcacggcgtcggaaatatggagttccgcctccttcaagcctggaaattccgggatagccgcccattcccttttcagttcctccctgtcccttttggactggggaggcatgccggacggaccggaaaaacggaaaagggggaagtaaccctccatggctcccatgttgcccaggccagacatcagaaaaacgccgggagagaccttccacatgtgcatgtactggatgcggccttcctgaagggattccctggccacccactccggcatgttcgccggttccccgaattgttccgtcaggcccaccagaagagccttataggcggatttcagcctggtctcatattcggaaccacggtatttgctccgggagtagaggacaacggccctcaagccgccggaggggtcatagtcaaagttcagggaaaaagtctggccgcctatggactgcctggttttaaacacgccgttgagcccggtgcgtgaaaggagggcgtccgtgggcggcccttcaagctgcttgctccgcctcagggttttcagcacctggtccttgtccatccccacctccagtccctcataaagggcggcaagcaaaggggaacatgtgagagcgaagagtccagcaacataggctagttttttcatagaaaaagcaattgggcggttttctaccagaccggaagagttttcaaaaggataaaatgcgtcagcgatggagaggaaaatttttcataaaatattcatttccagtctacccacagtcttttcaaataatcctccccggagaaatccgggggcatggggtcatgagtcaggcggaaaccgggaacggcacaggccaccatcctgcggaagtcctcgtggcccagcttgcggcagttgctggtgcacagcatccagccgcccggttccaggcattcgcgagccagggccaccagctccccgtagtgggattccacccggaacacctttccgcggtcatcccgggaaaacgtgggagggtccagaataatgccgtgaaaggtgcggccctgcctggcgaaccgttccagccagcggcgcgcgtcccccttgcagaaatactgggcggagggctcaatgccgttcagcatgaaattttccctggcccagtccaggcacggctgcgccagatccagcgtggttgtctgcgctccgcccagggccgcataaacggaaaaggctcccgtataggcaaaagtattcagcaccctcatgcccggagcgcttttttccctcacccggcggcggtggtcgcgctgatccagaaaaattccctgggaataaccggcggacatgtctattttaaaacgcactccctgctccaaggccgtaaattgcaggggaaggagcggcccggcgatctggacgggcgcttctttctggttttgttccagttttttgtggaatacgggcatgcccgtatcccggagttcgctttccaggtccgcaggaatggaacagccgcgcgtggagacgagaagacgatccgccatctgatccacaaagacaccggggattccatcccccgccccgtccatgacccggaacatatccgtatccggcggaatcaattccctgttgcgttccacgcaataatgataatttctctccacggcagagcaaagagtaacggatgaagaacgttcccgcaatgtcaaagaagcaggagcctcatttcctccggagcaagagttccgccagggaaaaacggttattcggacggcccagttttctcaaatcggatgattacaaaaaattgcctgcaaggctagaccttgcaggcaacaacattttttactgccggaaaagaggttctcaagctcttcggcggcgaaccatcagggccgccagccccagcagactcagggacgccgtagcaggttccggcacggcaagactcctggttgcagcaacaatttcttcaggggtcgctacgcccggcgtaatgcccatgcccgttacatagtccgtgttaacaagcacagtttgatagttttgggatgtcgtcaaatcggtgtaggcaaaattccgaccattattgcatggcactccattacccttgtcatcaactacttttgttccctttgctccgtctgactggacagccgccacgagagtaagggtgacgtaatcagtctcttccacggtgtaggaaagattcgccaaactctccagagaaaggtaagcagaagcaccaggactccacacagatccctggtaggcaaacttaagaccatccgccgtcaacatcaagcctatggaaccggaagttgagttttcgcttattcttaaatcaaccagcaaaatgttgaaaaaatctgcttcctgtatggcgctccgcatagccgagagattcaggctgagcgtgatggaggaaggatgacgctccccaccggtggtaactgcggaagaaatggcacctgcagcaaacccgttgacgctgtcatcttccggagaagagtaggagatatcctcaccagaaaaattctgcgacagatccgtaaaaaatgtagtagcggcaacagcactgccttgaagaagcccccccaataagagagagataaaagttgaaaacttcatatgcgacattgtgcggattaactatccgttgggaaaaaacaggtattgcacaatgttctcaaaaaatgatgaacaaatatcgtaattaattgaaaatcaaattatatctattatatatcatggaatttgaaataaactcgtccaaaaaacattcacagatattttctacgatttgccaatctgttttttctgtctgtgaatctgcgtaaattccttttttttaaaaaaatagtttgacagcggatagttaatccgctcacaaaaaaagaggccggatttttcattcggcttctcacaggtcattacactgaccaacaacgatttccgcttattcagcatactgttcgttaagagcttccatgatttccctggaagcttccggaatgttggtgcccggtccgaagatggccacagctccgtgttccttcaggaagtcatagtcccggacgggaataacgctgccacagaagaccaatgatgttcagaacgtttctttctggttttgttccagttttttgtggaatacgggcatgcccgtatcccggagttcgctttccaggtccgcaggaatggaacagccgcgcgtggagacgagaagacgatccgccatctgatccacaaagatccatcccccgccccgtccatgacccggaacatacccgtatccggcggaatcaattccctgttgcgttccacgcaatgatgatcatttctctctacggcagagcaaagagtaacggatgaagaacgttcccgcaatgtcaaagaagcaggagcctcatttcctccggagcaagagttccgccagggaaaaacggttattcggacggccctccttcatcaacagagacattaaaaaaatcgcctgcaaggctagaccttgcaggcaacaacattttttactgccggaaaagaggttctcaagctcttcggcggcgagccatcagggccgtcagccccagcagactcagggacgccgtggccggttccggaacgctggctgtttctccagaaatagccagagcattgaacgtaggcgtgtgggaggaacccggagtattcaccgtcagaataatttcgccatcttcattggcaataacgtcactaatggtgtaccccgtgggagtccgggcctgaattgtctgagagttcgcacctatggaaggagccgcgctgtcgtaggtattggaagtcaccagggaattccaagcaccggccccctcaaaaggacacccggtaacaagggcaatctggtaggaagcaccagccaccagaccggaaatagtcagggaaagagaagctcctttggggccggagataaaggtctgccaagagtttccgaaagagatctggttttccatgaaagaatccaatccctgtgtatcaaaagaagttccggaggaaacccagtccccagaagcggcggaagaagtagaacccagattagcggaagaggatgccgtagccagggttgcaacaaatccggaaccggaatcggttacagaaacagtcttggcgggagtttccggaagcaaagaactgttaaaatcaaataatacagtagcagcactcgcggaaagcgcggataccacagccaacatggaaatagaggcgattcttctcataaatagcaggtaaacagcaactgatttcagtcagtaacggattgactatccggtgtcaaattattttttaaaaaaaagagggggttatgcggacggaacagatgaaaaaacggagtatagaaaaaataataaataaaaatatctccaaaaatattagttgcgacgtttattttaaataaataatatgctatttattatcaataatttgaagtcgatagtagctactactcctgaatattttcaatgtccgcataacccccttttttttttcaccggatagtcaatccgctcacaaaaaagaggccggatttttcatccggcctctcgcaacaggtatttacctgataaacaggaaattccgtttagtcagcgtactgttcgttaagagcttccatgatttccctggaagcttccggaatgttggtgcccgggccgaagatggccacagctccgtgttccttcaggaagtcatagtcctgggcgggaataacgccgccgcagaagaccaggatatccggacggccctgcttggcaagttcctccaccagggcgggaaggagaaccttgtggccggcggccagagagctcatgccgatcatgtgcacgtcgttttcaatcgccattttggcagtttcctccggcgtctggaagagcgggcccacgtccacgtcaaaaccgaggtcggcataggcggaggagaccaccttggcgccgcggtcatggccgtcctggcccattttggcgacaaggatgcggggacgacgccccgtgcgttcggcgaagtcatccgtcatcttgcggacttcctccaccagcggatcttgaccataggattgagcgtacacgccggtaatgagtttgattggtgctttatgacgcccgaagtgtttttccagggcggaggagatttcacccagggaggcgcgggccttggccgccttgatggcaaggtcaaggagattgccttcccccgtgcgggcgcattcggacagggcttccagcgcggcttcgcacgcggcggagtcccgttccgcgcgcagtttctgcaggcgggcgatctgggcttcccggacggtggtgttgtccacttccagaatatcgatctgggcttcctgttccaggcggtatttgttaacgccgatgatgggttcctttccggagtcaatggcggcctggcggcgcgctgcggcttcttcaatgcgcatcttgggcagcccggtttcaatggctttggccatgcctccgagtttttccacttcctgaaggtgggcccagcccttgcgaatgagctcattggtcaggtattccacatagtaggaaccgccccacgggtcgattaccttgcagatggtggtttcatcctgaagatgaagctgggtgttgcgggcgatgcgggcggagaagtccgtcggcagggcaatcgcttcgtccagggagttcgtgtgcagggactgcgtatggccgcaggcggcggccagggcctcaatgcaggtgcgggtgacgttgttgaacggatcctgttccgtgagggaccagccggaagtctgggagtgcgtgcgcaaggccagggacttcgggttcttgggattgaactgcttgatgagtttggcccacagcacgcgggcggcgcgcattttggccacttccatgaagtaattcttgccctgggcccagaagaaggaaagacgcggcgcgaaggcgtcaatgtcaatgcccgccttgatcccggtgcggacatattccaggccgtccgcaagggtgtaggccatttccaggtccgccgtagcgccggcctcctgcatgtggtagccggagatggaaatggagttgaacttgggcatgtacttggaggtgaactcaaagatgtccgcaataatcctcatggagggatcaggcgggtaaatgtaggtgttgcgcaccatgtattccttgagaatgtcattctggatcgtgccggagagctggtccagcgtgcagccctgttcctgggcagcgacgatgtagaaggccagcacgggcagcacggcgccgttcatggtcatggagacggacattttgtccaggggaatgcccttgaagaggatttccatgtccaggatggagtccacggccacgccggccttgcccacgtcacccaccacgcgggggtggtcggagtcatagccgcggtgcgtcgccaggtcaaaggcaatggaaaggcccttctggcccgccgccaggttgcggcggtagaaggcattggattcctcagccgtggagaagccggcgtactggcgcaccgtccaggggcgcgccacatacatggtggcatacggtccgcggaggttgggagccacaccggccgtaaagtccaggtgcaggcagtcgtcgtacacgctttccgagtaggtgggcggcacgggaatttgttcattggtcatccaggtttccgtttcggaagccggggacggggcaccagccttgatttcaggataggaggcggatgcaaaatcaggaatattgctcattgggtggaataggttggtggttgttagaggccgattttgttttgaatggcttcaacggtgttgtagcagttggccttgacgtggatgaagatgtccacgccggcttccttgaatgcttccacatagtcggccggataaccggcaagggccaccatcatgtccggtctggtctccctgagagccttgcagaaggcggggacgatttccggataagtgtcatccgtggagcagatgacgcacacggcgcagccgctttccgcagctgccctggccgcgtcttccggagtttggaagccggccggataaaccacatccagaccgccggcgcgcaggaagtcacgggagaagtccgcgcgggccttgtgctggcggagcggccccatgttggcgaagaagaccatcgggcgggaacccttttctgccacccaggcgtcagccttggcgagcagggattcaaaacgttccgccaggcggcgcttcggcagggcttccatttccaggggttcgccgcacttgcagtcagcgccggccaccagggccttgttgatgaggcaggtggaaaagccttcttcggcggccttgcaggcggagtccacgctcatttccacgaccgggagctgaatatccgcattcttgcagcagccgtggcccttgtgggcggaacagcaggagccttccggaacttccagctttttctccgccaagttgacatactggttgacgcccacgatggactgccggcgctggtccgccagctcgtaacgcctggcggcggtggcgttcaccttcttctggatgctgccggctttgagggccttgacgatgccgccttccttttcgatgccctggaagaattcccatatcttccgggaggcttcatccgtcaggttttccaggtaccaggaaccgccggcggggtcaacgaccttgtccagattgcattcgcccagcagaatcagcgggcagttgcgggcaatgcggcgagagaattcgtccggcatgcgcacggcagcgtcaaagggaagaacgtcaatactgtccacgccgcccatgatggcggagaacgcctgggcggagccgcgcagcaggttgacccagggatccaccttggagagggtccagaaggaggtgcgggcatggagcttgattttggcagcttcctcgctgccgccgcattcttttacgatgatggcccaaagttcgcgcagagcgcggattttggcgatttccaagaacaggttggcgccgatggaaaccgtaaagcgcatgtgcgccgcagtttcatccacggagaggccgcgttcctccatggcgcgcaggtaggccacggcagtggacagcatggcgcccacttcctcaaaggcggaagctccggagtccgcgtaaggcagcccgctgacgccgatggtctggaagccgggagcgttggcaacggcccatttggtcatcacggccatctggtcatagtaggcgcagatgcccttccccccgcaaagggagcccttcatcacagctttccccaccgggtcatacagaacgccgcccttgaggtccgccgtcttgacgccggcggccttgcaggtgttcaggaacatggagagggttcccaggccgcaggaaccgggagtgacatatacgggaagcccgtccagccggacgcccctgagggccgcatcccagtcagcctgcttgcgcagcttcaggccgcatttgcagttgagctggacgtttacggcggtcaggccgcggtccaggtcatgcagaagcttggcgttgaagtcttccggagaggaagcgggaatgctctgggcgatttcgcagggcttttccatatagcccagggcgcgcgttccgcggcggtacggaaattgcccggcaggcattaccggggaatgttcatcccatttgttatagatgggatgcagggtaattccctccacaagcttggtaaaaagctttttgtcaaaatcagcccctttcagggcagcgactgctgcctcgcgccattcggcgtatgtggctggtgcgaattctccgaaatcaatttccggagccgttgttttatttccctgttgcatggcgaagtcaatgggtaaggcctaatatgttggtttttaactatgcgcaaaccaggccaagtttaaagcgcaacattattttaggaaatcaaagtgtaaagtccagcgagaaaaatactcccgtccgcccgcaaatgcgaatttgcttcatcacgcgaggcaaacttgcaaaaacgatatccatggcgtaaatacgggaataagcatgcccccttctactaccgtcaaactccctccccagctggtccggcagctccgaactttccggcgccgcctcagaacggtgaagatgctggaagccgtatgccttgcaggcattgccgtcattctttcctacgcgctcctgtacctttccgacagattgtgggagacgccccccgccgtcggctggctcctgtttttcatcgccgtgtccggcctggcggtgtttattccctggtggagtttccggtgggtgtggcagaggcgcacggaatcccagctggcgcggctgatttcccggacggacgcggccctgggggatcgtctcctgggcgtcatcgaactggattccgaaaagcacggccgccaatacggttccgaaaagctgaaagaggcggccatggagcaggtggcccgcgaagtgtccgcccgggacctgacggctaacatcccccggcccagccacagaaagctgttcgtcctgctgacggttctcgccgcatgcacggcggccgtatgtgcggtaagcccggaagcggcagggaatgccctgaaacgctgggtccgcccgttcaatcctccggaacgctatacgttcacccagctggcccccaccccggattccctggtcattcccctgggagagagctgcctgtatgagatccggctggcggagggaaccaaaacccgcccgcagacggcagagtattttttccgcaacagggtgagccagcaggcgcctcttgcggacggcacatacaagatccacatcccccccatgcaacaggcggacagcctggagttttttgcaggggatgccgtgcgacggctgaacatcatcccgaaggggcgcccttccctgctgggagccgaagccggcgtggcctatcctgcctatatggcgcgcgccaacggcagggaagccatgagagcaggagttatttccgccccggaaggctctacgctgacgttgaaggtgtccgcctcccagcgcctgcagtctgcggaggacgcgcagggccagccgctccgggtggacggaagcagcgtcatcattccgaacatccttttggagaaagagcccagggaaatagagcttgactggatggacagcgacgggctggctgcttcccggcccgtgaagatacgactggaacccattgaagacaaacagccttcaatttacctgagaggcggcgaaaacgaccgctacgtgctggaggataccagcattgaactggaggtagaggcggcggacgatttcggcctccgggaaatgggggtggaatggcagggtgaaaaatccttttacgacggcaatgaggatgaaaacggggcctcagctccaaaaccggccggtgcggacaaaccggcgcccggcctccgcggggagaaagtgctggcggacggacagcccacgcagaccgggctgaaaggaacattcctgttccaggccagggcgctgaagttatctccccagcgcgtcgtcatccgcgggtttacgcaggattacaaaccgggaggcaggcgcgtttattcggaacccatgattattttcgtcctttccaagtccgagcacgcccagatgatccgcaatgaactggaacgcatcaccagcgagctggaaggcatgatccgccgcatggacgccatggcggacgaggcaaaacggctgaaaggaatggaaagcggcaaattgaaagatgcggagtcccaggaacgcctgcacgccctggccgatgaagagcaggccaacaggcgcgagttgggagacttgctcaaccgctcggaaagcctgtttaaggaagcctcccgcaattcccagatagacccggccggcatgaaggaattcatgaaaggaatttccatgctcaaacccattcccgacgggcccatgaagatggcccagaagcagttccgggattccgcctccgagagccgctccgagcaggaaagcaggaaggacctgaacgacggggagaattcccattccgaagccacacaggcgctgaaagacaccatgaaccagctctccaagtccgcgcaggacatggaggccagcacattcgtggcacggctcaggcaggccgcatccaaggaggattccatcgcccatgcactggccggccagatcaacaccattgcgggcatgaccatggaggagcttgacccttccaccaggcgtgaaatggaaaccatcgccacccttcaaaacgcctccacgcaggacataggctggattctggaagacctcagctattacaagtcacgcaccggggagcgcatttacagcgacctgtacaaccagatgaacgctttctccctccgggataagctggacctggtgcacggcaatatcctgaatgcaatcacggcccgctccattgacgagtcccgcctgtatgcctccaccctgcgccattgggccaaattgatagacgactataagaagagccgccgcggcggcgggggaggaggcggcggcgggggaggcagccagtcctccatttccgacgccgagtttgaattcatgctgaaactcatccgcatgatccaacaggaacaggatatccgcatgcgcacccgcgccgccgaacaggaacaccgcaaaaaatttaccccacctgccccatgaataccgccaatttcccagccatgattctggcactttccctgccctgcgccgccgctccggcccctgctccggaatattccgccaagcacaaggaaacggcatccaaactggcagtacaacaggacgagctccaggcggacacttccgaccttatcctgggagaaaccaatgaggaagtagtggaactgctgaaaaaatgccgccatgccatgaatgacgccgtggacctgctggaagtttacaataccggaggccagacgctggccgcgcagtcggatgtgattgaattgatttaccaggcagccaaggccaagatgaccggggccgacggccagcccaagccgggaggaagagctcttatggacatgctgcgccaactgctcggcatggatcatgacgcccagtccgcagaacagcaggaaggggatgaaaaagggcaggaaggttcccagaaaggcagcggcaacaattccggacgcggaacgaatggaaaatccaatatggcctcctcccaggataaaggcgtttccaatccggacacggctgtggaaacgcgttccgttcccaaatccaccggcatgtccgcagacgacatgccttccgaattccgcaaggcgctggacgcctacaacaagactttacagaggtaaaacgcccctctccggacacagccctttcacgcatgaacagcaacttcccgtttccatgaaaaatccccgcctcctgcttaccgctttcttgacctgctgcatgacggccgcaccgcaaaacgcagcggcccaatcccccatgagaacgtcttcttccgtgcctccccaggtggaactgatgtatgtgaagggactacgctatcttcagaatgcccagaaaacggatggaacctatgatggaacttacgggagggagcccggcatcatcggcttttgccttatgtccgtgctggctcacggagacgatccgaacgcggggccgtacgccaccatggtgcgccgctgcgtagattacatcctgtccaagcagaacaaggtatccggctacattggggattccatgtacaaccacggcttcgccactctcgccctggcggaagcctacggcatggtgcgggacgaccgcataggccccgccctccgcaaggccgtagctctgacactgaccgcccagaaaaaaaacaaaacgggaggctggcgctattccccggaatccacggacgcagacagcacggtgaccggctgccagcttgtctccctgttcgcggcgcgcaacgcgggcattcccgtgccggacgaggcttttgaacgcggcctcaagtacatggcttcctgccgcgacaagaaaggtgcctacggctacaccgggccggcgggcccccgcgtcaccctcacggccatcggttccctgacgctgtccctggcgcgccttaaaacggacccgtccttcaaggattccctggcctacctgaaaaagcacctgaattaccgggattccacttatccgttttattttgaatattacatgtcacaggccctgttccatgcggaccaggaagtgtggaaggaatggaattacaaaaatatgcgctatctgggagcctcccaggcgcccaacgggtcctggctttccgatcattccgcggcatattccacttccgccgccctgctttccctcgcgcttaattacagatttctacccatctatgaacaatagaatccgtctttccctgctgctggccccggcctgcctgctgaccgcctgggccaattccgtcatcgacgtggttacggataacaattaccgcctccgcggggaaatcatttcttacgggaaacagggcatcgtcatcaagcacccggccatgcgccagaacgccgtcattctcccgtcgggaatccgcgctctttactttacgggaaccgcctctccggatcttcgcgcccgggacaaaattttcatggctgcggggcacagggacattatcccgtgcaatatcatttccatcacacaggacaaagtgcagtaccgggacatgctgggccatgaacgttccgttccccgcagccaggtggccgggttccggctgaatacgctgcaggaaaagggcttctggcaggaaccgctgatttttgacaacagctgggtttattccggcaaccgggaggaagactaccgcacccaggcggggagaaaactgatgaatgccctgaagccgaaagtccagggggacaagtaccagtaccggctgggcaacaatgattaccccacctggatacccctgtacaagaatatcggcctggatccttcctccttcaccttccgcaccaccatcaccatggacggcaataatgaccgctccggcattgtcttctgtttcggggggaatgaaaatattcctttccggtccaattccggcagcaacctgaacaggctcatgctcagcatctcgcccggaaaatgcaccctgctccgggaacagaaatccggcatcctcgtgctgggggaagcggccattccggcccccattctgacggagggcgtggatattcaattgacagcctcccgccagggtggaaacaagcaggtttacgagctgttgataggcgatctgccgcccagactgataacagaccccagcccgccggaacagccattacagggagacgccttcggcctccagatggaagggcacgtgtccctaaccatcagcaaactggccctttcctccatcaccctgagcgccaaatccgtggccaaaaacgggaatgcagagacagaccttgtcctgacaaaggaagaagacgccattccgggttccgtcagcggttacgacagtaaaaccggaacgctgacgctttccacggacaaggattatccgggcattccccgtgatttttccatcccagccaagtatctggataccgtcttttttgcggaacggaacaggaaagacgactcccgccccccagcccgccacagcctccagatgaaggacggttcccgcctgcacggagatattctgagcatggattccctgaatatcatcctgcggcatccgcagctcggacaaatttccctgccgctgaaaaacatcacccgcgtggaattcctgaatcccgcccagccatcccgttccactccctgattgatcccgccatgaaacaggcaattacgcttttcctgtgcgcctgcgccctgccgaccgccctccttctgccccatgctcgtgcggaaggtgtcattacgcttaaatccggggaaaaactgccgggcagcatggatacgatgaaccgcccttacctaaaggtccgttccagcattctttccaaacccgtggatgtccatatgggagagcttgacgagctggcctcttcccgtccgctggaaataccggaacagttttccatcatcaggctggccaatggggacgaggtttacggcaccctgaaggcgctggatgcggaaaatcttcaactccaaaccgcttggggcggcctgcttcaggtggaccgcaaatatgtgcgccacatcgggttcgactcacaaaaagcctacctgcgcaacgctacggaatccctgcagggctgggagtcttcagccaaaagcacgctgcccgaatgccgcaacggatactggctcatgcgcggctccaataatacggaactgcaaacttccttccccatgccaccccgcctccatgtgcagttctccctttaccataccaatacgttccggattaatcttgccctctggaaggattccgaatccggaaacagcatcaacctggatctctccctggaaaaagcggaactttccaagaacagttccggccagtaccgaacgcttggcagggtgaaaaggaacacggagcggaactggtatgccgacaagagcgtcaagcgttccgacgttcatttttacgccgatccggaaaagggcaattattacctgtacgtcaacggtgaacaggtagcccggtgggaggaagtcaaagagatggacactatctttgaaaacgagagcggagacgatgaaggggaagatggagaaagcgccgggaaatacgaattcaaaccgggaaacactcttgccctgggaggttatgacagcttgaacatggccgtattccatttgaatgtatttgactggaatggagccattccccatctggaggaggagctggacatcatttcccgttacgacccgaccgcccccagagacaaggccctgctggtaaacggagacgtgctcaggggagccatttcccttcaggaggaaggctccatccgcatcaagtccgaccattatgacgtcaccgttcccaccgccagggtacgcgcactggaccaaaaaggccatgaagagaaggaccttccggaagacagctcagacacccgcgttttcctgacggaccagagcgtcctttccctggccctggaaactatccggaacggggtcatggaagggcgctcatccgcagtcggcaaggtccggattccgctccaatccgtcagaaaggtccagttcaacctgcaaaacccggagctgaggaagcagagggaaacgccgttccggtgcaaataaaggcttctccgccaggccgtcctttccggagaaagccggctgccgggaaagccagaagaagcatccgttaccgctcctccatttcctccgcgcgccgtacggcacttttcaccgcctgaatccaggcattgcggaagccgcattcatccagcgcattcagagcggcaatcgtggtccctccgggggaagtgacctcatcccggagcgccatgggatgcttcccggtccgttccagcatcagggaagccccccgcatggtttccgcagccagccccaaagcggttttcctggacaatcccatggctacccctgcgtctgcaagcgcatccagagccgtaaacatgtaggcagggccgcaaccggaaatggcagaaacggcattcatcccggattccgccaccttgtaaacggagccgcagccggaaagcagcatccgggcagcctcttcatcttcatcttttacgccgtttcccgtactgtaggcgatgacgccggccagcaccatgcacggggtattgggcatggcacgtataatgcgcgttccgtcgctggcgcaggcttccatatcatccagggaaacggcggctgcgatagaaatcagaaggggaagctccgccccccgttcggaaagagaggaaatgagcggaaggacgccgtgcggcttcacggccagaatcaggacttccacggcgtccgccgcatccgcctccgaggcagcttcatgaactccggggtattcctcctgcagggcctgcacgttttcatgatgatgatcgtacacccaaacttcctccggaaccgctgctccggctttcagcatgccccgcaacagggcgcctcccatttttccaagtccgatgatacctgttttcatggttgatgattttttacagtcaacatataagcgatttatagaaaatggaaatgccaattaaggcccatggctatggacgagaatgccccatttccgcgtttgttccctccggccctgttatcaacgtctctggctggacatgcggttgggattttgcgtactgggccgcgttgcagaaacagccctcaatatggtcgttgacaaacccggttgcctggaaaaacgcataacagatcgtcggaccgaaaaacctgaatccccgccttttcatgtccctgctcatggcttccgactccggagaaacagcgggaatctgagccagagcgctgaaatggttaacaacgggctgatgattggggaaaaacgacaagacgtaccggtaaaaactgccgaattcttcctgaacggccataaacagtttcgcattattgacagcgctgttgattttcaaacggtttttgacaattccatcaaatcgcatcaaccgttccacatcttctgccgtcatccgcgccactttctccacatcaaagtcatggaaggctctccggtatccttcgcgcttccggaggatagtaagccaggataatcccgcctgggcgctctccagcaccagaaattcaaacagggttttgtcatcggaaacgggcctgccccattcttcatcatggtatttcatgtaaagttcatcggttccggcccagccgcaacgcgcattgatgatatccttcatacggttgcgccttagaattcctttttcctgaacagccacgccgccagcgtcatgtgaaagacgaagtatcccagcgtaatcagggccagggttccgaacagggaaaggggaataagccgtccgttcagggcggaatccgtcacggaataaatctggaaattcggaaaaaccagggaaaagagcctgctgcccgccacctcccaccaggaaaggccatccgtgccggatcccacccacagggaaagagcctgcgtctggaacagtcccgccagatagatcatgaacgtcagcagcgcgctgataatggtgccgttcgtcacgcaggacatcaacagcgtgagggaggaaagcacgacaaactcgcacatcatcacgcccagccccgtctgcacgttccaggtagctccctggaggcggatcctgtccaggtacggctgcatttcctccaacgtataacggcctttcagagaggctatctgctccgccaccaccgtatccgtccgcatccacagcaccagcgtcattacggcatccatcagcagaacggcaaccagggtcagggccagcacccccagcaccttccccatcagatagtcgatgcgcggcaccggtttgcaaaggatagtgtatagaatacggtcctccgcatccctgggaataatcagggccgtggccgccacgcagaaaaagaggccgaacacccgcatggcgccgtaggcggagtttttcagcagcacgagttcattgattcccccggtttcaggtcccagcaccgcgctcaggcggaaggaactcagagccagcaacgccacggcgaagagcccaagaaagagaaacaccttcatgcgcaccagctgcgtaaaggtggtaccggcgattacggccatgcgcccgggcgaaggtatataaccggaggtaatccatgccatgcggatcatcttgccgtattccggagcaaataaaagagctttttatttcatgtgctgaactccttccgccttgaagaagcgcttctcccgtgttctcatggagcgcgtatgagtttacgatcccagctggaagaactgctcccggaacttttgccttccgatccggcccaggccattaagggaacagaactcatccgcctggtgcgcctgaggctgggggaggaatattcggacgcatccctgcgctaccatttttctttcatggcttccgagccggattcggaaatcgccaaggtggaacgcggccagggctattacaggcgcatgagggaacgggacgggcagcgcgctcccagagggcttttgcccctgttcctcggggaaaacgaaccggacgccctgaactgccgcgccaaggcgctggccctggccgtgcgccagtacgataccacgggccgcggcgttttcgtgttcagtaccagtgaaaccggaacttcctgggtaaaaccggatctggccgttgtggaatggccggagggggaatgggagggaaacgcgcttgtttttgacaaaagcgcacttcagcgccgccgcatgatcggggcacccatgatgggcatccgcagcgtctgcgtagcccgcatgcccggtggagaagacggcagaagggaatttttcaggactctggccacgtcccgctgggcacagtgcggagaactggtcattgtgggggaactgccggatgattccgaatgcgccgccctccgcgggctggccgccgagttcggcgtaggggtgctttgcctggaaattgcggacgaacgcctgggagagctccccggcgcggaggaaattttcaaagccggagatgaagaatgcgccgccctgctggcggaactcacgcccgtacggctggccgccggaaggctgaagacgctggaggctgatacgggggaaaccctgggcggggaattcggagccctgttcgactggctggccgcctgcctggaacgcggcagcgtggaagaatatgaattccgcgtctcctgttactgaatgcggcggagagattcttgacagaacttgcgtattaaattaaagactttcccggctccaacccgcccttccccctgacatggaacaagaaacactggtttacccgcttgcggacaatactgttctgcaagacaaatatacgatattgagcgtgctgaacgccggcggcttcggcatcacgtacctggctctggacaaccccggttcccggtatgtcgtcatcaaggaatgcatgccggacgcctacgcctgccgggatatggaaaccggcgttgtccatccccggaacgaacagaccgccgtcaatttctcccagagcgtttccaattcccggcaggaggcttccgtcctgtcccagctcaaccatcccggcattgtccaggtgtttgacatgtttgacgccaacggcacctgctattacgtcatggagaatatccagggacagaccctgttcgacctgatgaccaccatgcacgccaccgggcaaaccatggaaccggcccaagccacggatcttctgttccgcctgctggacatcctgcactaccttcacaccatgggagtgtaccattgcgacatcaagccgagcaacatcttcatccagccggacggaacgcccaagctcatcgacttcggcgccgtgcgcaccaaaaccctccagcatcaggggctcgtccagatcacgcccggctataccccgccggaattttaccccggacgccggagcgaaataggcccctggtgcgatatgtacgaactgggcgccacgttctacgaattgctcacgggccaggtcccccatcctgcggaccagcgttccgtggtggaccgcaacccgaaagtgaccagttacgcggccctgcggaaaacttatcccatgaacttcctttccggaattgacaaagccctgtcgccggacgaacgcaaccgcttccattccgccaaggcatggaatgactatatcaacgccatggcggcggcaggcaccctgcaggccggcggagtatcgaggaaggctcttccccaggccaggaaaaaatcttccgcaggcacggctttcctcatcatcctgctcatcgcaacggcaatcggctgggtatgctggaaacagggtctgcttaacttctgattccggccgctttccggcggaaacattgaagggtgatgtccgcaaagacacgccccccccaacgcaacaagggctgaacctgacggtccagcccttgccaatccggaattgaacgggagaaacagcctttacaggctttccccgaagtcccggcggtatttggccgccagtttttcaggccagtcgctcttggcgcggagcttgcccatgaagaagcgcaggacgggcggttcctccacaaattccaggccgccaatcaaatcgcggttgtcatagagccacttcatgcggtccgccacgtatttcacctgggataacgtgaaaacacggcgcgggaaggccaggcggagcagttccacatccgccagaatgtccttgccgttttcgtcgcggacgctggaaagcgtgccgcgttccatgccgcgcacgccggaggcgatgaagaaagccgccgccagagccccggcgggatagtcctcctgcgggatatggggcaggaaacgccctgcgtcaatatgggcgcccagaccgccagcgggggttacgcagggaatgcccatgtccaccatctggccgatgaaatattcaatgaaggaggggctctgggaaatcacggtcaaatccgtggtttcatacaggcctacggccatggcctcaatttcccgcacggagatgccgccataagtcaaaaagccttcaaagaggggaacgagatgctccattttcttggcaatggcccggtcgttcgtgcagatgccgccgccgcgggaggaggaaaccttgcgggcggaaaaatacaccagatccgccagtccgcacatggtcttcaggatgtccgcgcaggacgcatccctgaactcgtcttcacgcatcttgatgaagtaggcgttttccccgatcagggaggcgtccagcaccagcatgatgccgaattcatcgcaaatgccgcggatttcccgcatgttggcaatggagaagggctggccgccaatcaggttggttgaggcttccatgcgcacgaaggggattttgcccgccccgtgacgggcgatgcactcccgcagcttgccgggatccagattgcccttgaagggattggtgctgaccggattgacggcttcatcagccaccagttcctcaatcttgccgccgttcaggtcaatatgggcgtgcgtggtggtgaaatggtagttcatcggaaccacgtccccgggcttcacgaaggtgcgggcaatgatgttttcacaggcgcgcccctggtgggcgggcagaaggtattccttgccgaagacatcccggacagcctgcttcaggcggtcaaagctctgggaaccggcataggcgtcatccgcccggaacatggcggcgatctggttgtcgctcatggcgttgacgccggaatccgtcagcatgtccagatagacatcgttcgtgctgagctggaaggtgttgaacccggcttcccgtgcggcttccaggcggcgttccacggggacaagatgcagcttctgcaccacgcggactttatgcagttccaggggaatttgttccccattgtaaaatttgacaacgttggatggttctgaattcataaaataaaaggtaaacaaaagtgtagcagaatgaatcttttccgcaacataaaaggacaaacggcctttttttgccttccgacggaaaggcaggaatgacgctggaaggaaaaatgtggaactttccggagggagtttctagcgtggctccctatgaaaaaatactggaaattgattcaacagcacctgggcgtggatgcggacggcatccccggccccaagacggcgctggccctgctggacaggctgggcatccgccaaccggaacaatcctggcccagccaggaggaagtgcgctccgggaaatccgtcttcggccgtgcgggtgatgaaagcaacatgaccagcatcaagctgccttatatcatgcggctggcgtgggaaacaaacacgaccgtttccaccatgcgctgccacaagctggtggcggaaccgctcgtccgcatcttccaggctactctggaccattacggcatggagaaaatcagggaactggggctggacctgtacggcggctgcttcaacaaccgctccatcatcggcggaaaggccacatccatgcacgcctggggaatcgccgtggacatggacccggacagaaacggcctgaacatccccgcaccgaaagcggtattgtccggaccggagtacgccgccttctggcgattcgtggaagcggagggggccgtatccctgggacgctcccgcgactacgactggatgcacttccagttcgctactctttgaccggagcggacgcgaacgtcctccagccctcctcccagcggcggcggagggctggccagtcctcaccgttccctccatgccccaggaaagagcgctttttcagctcccggaaactttctccgggaaggtggagaagttccccgcggtcataggcattctgatcacacatgccgttaaaaacgggagtccactgccagcggcgcacgcccagataacttttgaatgtatctaccagttccgtcgtgcagttggcggtgacggtatgataatagcgcgggcgttcatggaggctgttgattttttccgcaaaccccagaaaggcctttttcaggttttccctgccgatgttgatgcggtacaggtacatgtcctctttccggtaattggtgcgcagggcgaacaggtcttcttcgtccgccaggatgtaaatcacgttgaattgcttgtaaaggccagggacacttccctgctccaccccctccggcaggcgcgtttccacggacagggccagatgcttcccatcctcaaaaccgaaggacaacatggtatgggccacgaattccatcccatcccagtgactcacggcaaaatccagcgtagccagcttgtccaggtcaaagcggcgcgtcacatagcgcgcgtcgaagtcccgctccgtccggtagataaaactgcgcacgtccttcaccacgatttcatttccgttgatttccacggagggcaggcgactccaggacggctgccattccttatcgttcgtcgccggtatgaacaggtagtacgccagcagcagggccggcactccccaggaagcgcgccataatacgggccgttttccgcggagggcgaaggcgcatgccatggccgccacgtacagccacaccagcacggctcccccccatacgttgtaaaaaaccacgcccgccgcccatacggagaaacagaaccacgccgccgtcatcaggatgcgggcggcggccgggcacgcgcggcgcaggaaagtcaaatgcatggaaaatgaaaagcaggccgcgcgctccagcccatgaaacgcgcggcccgttaacggggattacctgaaggaaaggcccttcactttgtccgtcagggctttcagcacgcgctggtgcgctgcatccacttccgcggccgtgagggttttggccggatccctgtacaggaaggtataggcaatggatttgcggtccgccggcagcttttcaccggaggggtccgtgaacacgtcaaagcaggaataactgacaagcagtttttcccgtgcggattccacggccttgacaatgtccgcattgggcgtggagaggggcagttccatggccgcatcgcgggaagagccggggaattggggcaattccgcagccttcacgggcgcggtgaggatttcctgcattttgcggagatccagttccgccacgtacacgggctggcccaggcccagctcccggcagcgcgccagggacaggcgggcgaaatagccgcaggctttcccgtccagctgcacatccgcccccagggcggcctgttcgcgcggtttggcaggcgtaagcgtaaagcggtggcccggcgccagagcagccatcacggccagaaggtcctcaaaggaggcctgctccggcttggggtccgcccaggagcgcgccgtgcggtccccggaaacaagaatgcccagggtatccgtttcaatgtccctgcccttgccgccgcccgtattgcggaagacgcggccaagttcaaagaagcgcaggccggacacgccctggttgctgttgcgcacggcggcggcaatcaggccgggcgtatgggcgggacgcagcacggagtgatcctcgctgagcggcagggacacgcggatgaggtcaccgtcctgaagggggcgcaggggcaacgcgtccttcacctgggcaatggcgccgtccgcggattcagaggcaatgagcttgatggtctgggtttcataaaatcccagggccgccagcttgcggcgcagctccatctggaaattgtaggccgcatccaccggggattccgccacgaaggggccggagaagcgggacggtatgccgtccaggccgaagacgcgcacgatttcctccagcaggtcgcacggacgcgtgagatccaggcggtggggggggatcagccagcattcaggagattccggaacctgcttcaggcccagcgccgtcaggatgcgtgccccttcctcatgggaaatggaaccgccggacatctgatccagcgccttccagggaagttttacaaagcccagttcattagtcaccgtggcgcccttcccctgcttcagggaagcgggcacggaaacggggccgtccgcccccccgcaggaaggcatggaagcatgcgccggattaggaacgggagaaccggccacatacgtcggggaagccgttccgcccgccagctggagaatcagttccacggcgcgcacggaaccgcgcaggacattccaggcggaagtgccgcgttcaaagcggtaggaggagtcggaggacagggccagcctgcgggatgtggcgcgcacggaggagggcttgaaccaggcggactccagaatgatatccgtggtggcgtccgtcacgccgctttcctccccacccatcacgccgccgatggcgagcgccttgccggactggtccgcgacaaccaggtccgtgcagttaagcgtgtattcctggccgtccagagccttgaaagtttccccttcataagcggtgcgggtaacgatgccgccctgcactttcgccgcgtcaaaggcatggaggggcgttcccagttcatgcaggacgaagttggtaatatccacaatgttgttgatggggcgcagaccgacggctaccaggcgttccttcagccattccgggctttcctgcacgttcacgccgctgatttttacagcggtgtagtacgggttcagctccggctggtccagccgcacgaagtctccggcgggttccagttccaccccggcgtcgtcaatggaaacgggcctgtactcccggccggagatagcagccagttcatacgccatgccgttgtgggaaagcaggtccggtcggttgggcgtcacttccacttccaccagggtatccgccttgacaacctgggaaataggcgtgccgggttccagttcctgggggagaatccagagaccgtgctccttgtcgggaagccccagctcggaggcggaacagagcatgccgcgggactccacgccgcgcagcttgcccaccttgatttcaaagttgccgggaagcaccgctcccggcagggcgcagggcaccttgtcccccactttgtaattctgcgcgccgcatacgatctggtgcagcgtgccgtcgcccacgtccacctggcagaccttcagccggtccgcctggggatgctgttccgcggcggccacgcaggccaccaccacgtatggggaatccacgccctgctggcggatgtcttccacctcaatgccggcaaaagtcagcatgtcagacatttcatccacgctcaggccggacaggtcaatgtactgggaaagccagttaagggaaatcttcataacgggaaaacagataaggattattggaattgggcaaggaagcgcacatcgttctcaatcagggcgcgtatatccctgatgccccagcggatcatcgccaggcggtccagaccgatgccgaaggcaaagccggtcagccccgtgtagcgggcctgtgagcgggggtccagccccagttcacggtccacggcttcaaaaacattgggatccaccatgccgcagccggcaatctccacccagcggggggcctggccgtccaccttcagcttgacgtcaatttcaaaactgggttccgtgaacgggaagaaatgggggcggaagcgcacctccgtgccggagccgaaaagggcgcgcagaaaatattccagcgttcctttcaggtcgcccacggaaacgtccgtatccacatacaggccttcaagctgattgaaggcggaaaggtgcgtagcgtcaatttcgtcgcggcggtaggcggaaccgggagcgatgacgcgcacgggaggcatctgcttttccatggaacggatttgcacggaagacgtgtgcgtacgcagaagcttgccggaatcaaagtaaaacgtatccttctcattgcgcgccggatgatcctccggcgtgttcagcgcgtcaaagcagtggaactcgtcctcaatctccgggccgtccgccagggcaaagcccatgtggcgcagaatgcggacggcttcatcccgcacgatggtgagggggtgcagcccgccagacggcagggagcgggccggcagcgtcaggtccaccccggccacagcggccttgtccgccagggcctgcacttcttccagcttggcgtccagggcttccgtaatggccttgcgggcctcgttaagcaactggccgacggcgggtttttcctccctgggaacgtccttcatacccgtctgggccagggtcaattccccttttttgccgaggatggccacgcgcgcgtcttccacgccgcgcctgtcagacgcctgggcgatgcgctccagagcgtcccgttggatgcgtacaatctcttccttcataaaatttgacgggcaagagcttacccgccccccccgccagcgtcaagcccttcgggccgcagggacgtcactcaagagaaaatggcggaatacggaaaagagggaaagaacaatgaaccccgcttcctaatcactaatacttaatcatgaatatctccccagaaaattacacgtatcccggccgggaggacatgcggccggaaaccatgccgagcacgcagaacaaggtataaaccaggcagaacggcaggaaggagcctccctgatgcaggaaggaggtaaacagcaggctcaacagggcgcccatggtaaagccgattccctgggacatgccggaaagcctgattgattcggaaggcgtccgggcccgttccaccatcagcgccattccgcggctgaatacggttcccgtcgccaggccgaacagaatcgccatccagacggcccagtccagcggaagatacaggatgccccagcaggaaagggccgccaacgccatggccatcacgatgaggaggccccgccctcccatagctttttccagcacgtgagcggagagcgtagcgggcagctgggcgaacatggccacggaaaggatgaaaccggcgtcctcatagctcatgccccgctgcctcagaaagatgggaatccaggtataaaagaaataggcagccccaacgcggctcaaataaaaaacggtaacctgccatgccttgccgctgcgcagcaggctgcgtccggatgccgccggatcgttttgaaacacgccgtccggatgcctgagaaaataagcgccccataccagcatccccagcaggatgggaataatccagatccccaggccgaaacgccagcctcccagcatattggaaaggggaacggacaggccggaagccgcagcgctgcccacgccgatcatggcgctgtaaacgcccatcatggcggaagcacggtcaggaaactggtgcttgatcagtccgggaatggccgctccggcaatccccatgcccagccccatcagaaccatgccgccgtataaccccgccacgccgtcccagctgcgccagaaaaattccggccaccgccagaagctggaaccagaaaatgattttccacggcgtcatccggcgcgccacgcgcggagaaatgggagccgccacccccagcacaaagacgggcagcagggcgaacagccctgaatttttccagggaaagccccatatccctttcaatcgttcccagcagcggatcgggagaatcaaacccggtacgcagattaaagcacacgattaaaaaggcggcaaacaacagcatctttcccctgatgcctctggaagttcctgccttatccatcccatgttatacagcctctcccccgcccctgttcaaaagcgacagtcttccggctgtcagcggtccggaaaatacggtatggagaaaagaccatcaggatgagcaattcccttgctgttttccatccgccaccctgccatgaaaaagcgccgccgtcccggagaacggcggcgcccgaacacgctaacctcttaagctttcatttggcagggcgtttgccgtacaccagcgtacgcctgccgtcccaggaaacggcttcaatccgcgtagaaccttccggatagggaaccgtagtggaggaattatccctggaatccgtccccgccatggtgatgcggaccatttccctgtctttgtatgtttcaaagacgacggcgtttttccacacgtcatgggaaataatgcgcctgttgccctgctccgtaacgccctggttgtaaacgccgcggacaggcagtcggttcttatatgcttccgcgctattgacggaaatatagtaaatgacggggctttccggctttttgtacttcctggcgtaggcaatcaggttcttgcagtcggcctccgtgatggtcatgcgggcgcaggtgtagtcgtccaattcctggtcaatgggcttgagcatgcccgttttccggaaaaaatccgtcaggtcctgtctggcggcgtcgcaggcgttcttcatgaacgcaagctggagctcgccatccttcttgcccctggtatccatcttgatggccttataaaagatatccggataaaagtcgggattgcccttcccggctatcttgaagtacagctccagctgccacaggggagccagcttgacaaaatggtcgtgcaccatcggacggttatccccgccggaacgcttgtccggcccgctctggacaagccagttttcccccttcaaaatgccgttgttcagataggcgttgaagcggccgccaatcatgttgccgtccccgccgttgatgcgttcatgctccaggcgcatgctggagggattcagcatgtaattcacgtaagcggagtaaatgttattggtcacttctccggtggatacccatttcatggcggggcgcacctggttgacgtggccgaactcatgggcaatcccccaggcgctgccgggaatcctgtccggattgcctacctccttcatggtgccgttatgaaaggcggcccccgtgccgtccgcatgcatgaacccgttccagatcacacggccgaacatccggtttttgggcagcatcctgtacttgtacaggcccatgatctgctgctccatgccgataatcctgtcgtacagggcaatgagctcctcccccttgtccgggcagaattgtttaagttcctccaccggatacaccagatgcacgcggttgcccacgatgtccacaacttccgtgggggagttttccagcatcctcttccagtcgctgtttttgctgacgcctcccacgaaaactccattcaccttgccggacaaaatggacaaatgcaccttgggcgctttcttgtaattggatgtgaaatactcaatgtagccaagccccttgttcttcgccctgatgatgttgaccccctctttcagcggataggagctgtggcctccgtcccgcccgaaattgtggataaccagattcagtttttcacctttgggatcccccatgaccagcaatacgtcctccccctcttcaaaaaagatgccggtgggattttcaaatttgctgtactggctggtgcgcaggcgttccgccagatccttgaccggttcatacggctccgccgtcagggcgcgggccttgcggtcaaatttcttctccgccatctgctcggcgagcccacgcacaaagggatccttaattttggcgatgcggtcgcgcgtgacattgggcttcaatgcaagcatgtattcattggcgaacacattggaatccaatgccttcaaaccctcctccgtaatcggcgagccccctgtttcctgggcggaaagcacgcctccgcccagcacgccgcagaaggccagtaaaagaatcccctttttcaacaatggtgagaaaatcatatttgttaaataatactgttcggtttccggaattgtttcaaggaaaaacgcccggcccctcccatgcctgtgaaaaagcctttttgtgtgacatgggacgcccgggcccagggagaaaaactgtccatcccccttgacgggggccgtataatgacgctcgcaaaacatttttccatatgaatacagaaacacatcaatttcaggcggaagtccggcagctgctggacattgtcatcaacgccctttacagcgaccgtgaaatctttgtccgcgagcttgtttccaacgcttccgacgccctggaaaaactgcgtctgaaacagctgacggattctaatatttaccagccggacaagcccctggaaatcaccgtcaccacggataaggaaaacaagaccattaccatcgcggacaccggtatcgggatgacggaagcggacctggtggaaaacctgggaaccatcgcccactccggcaccaaaaaattcatggaggccctcaagcagaagcaggaaggcggagcggacctgattggccagttcggcgtgggcttctacagctcgtttatggtggcggaccgggtggaagtgttcacccattcctgtgaaccggaagccgcctccctgcgctggtcttccgacggacgggaaggctacagcatcgaaacactggcggaaccgctggaccggggcacccgcatcgtcatccgcctgaaagacgaatatgaagagttctcccaggaataccgcgtgaaggagctcctgcgccgctactccaacttcgtggggttccccctcaacttcaatggagaacacgtcaacaccgtccaggccatctggtccaagtccaaatccgacgtgaaaccggaggaatatgatgaattttaccagttcattgcccacacggatgaaaagcccctgtcctacatgcacttcagcgcggacgcccctattgccctgaatgccctgcttttcatccccaggcgcaatccggaaatgttcggattcggccgcgtggacgccaacgtggccctgtactgcaagcgcgtgctgattgacgccaagccggaaggcctgctgccggaatggctccgcttcctgaacggcgtggtggacagcgaggacctgcccctgaacatttcccgcgaaatgcttcaggacaactccctggtgcgcaaaatcagcgacatcatcaccaaacgcttcatcaagcatctggaaaaactggcgaaggacgatcaggaaacctacagggaattctacgcgcaattctcccgctacctgaaagaaggcgtcgtcacctcctggccgaataaggaatccctgggcaagctgctccgttttgaatccacggccacggaaccgggggaaacgacctcatttgaagactacgtcacccgcatgaaggaagggcagacggccatttacgcgcttaccggcccctcccgctcccatctggaaaacagcccgtacctggaagccttcaaggcccgcggctatgaggtggccttcttcacggaccatggggacgaattcgtgctggactccttgtccagcgtggacggaaagcccgtcacgatgatcgaccgcgccgacgtggaactccccgccctggaagaggaacagaaggacgccctgccccaggaggaagccgcggccctggaagaatggctgaaagggctgtacccggacaaattctccaaagtcaccctgggcaagcgcctggtcagcggagccgccgtagccctgcaaagcggcaatgacatggggccggaaatgagggcgtacatgaaagccatggggcaggaagtgccggaaagccacccgcagctggaactgaacccctccaacccgctggtgaaaaagctttccgccctgcggacggaaaacccggaactggcgcaaatggtggcggaccagatcgcgaataccgccctgctccgcgccggcatgctggacgatcccgccgtgctggcccagtcctcccaggccctgatggaacagctcctgctgaagtaaggtacccggaggaaacagcctcttttccccaacgccgccgctccctgcccaccccgccgggggcggctttttcatttctcttcccgccatgaacgcgttacgccgcatgccccgccacattctgttcctgaggctggcctatcaagcgggcatgtgcctgctggccctggtcgccgtaacgctgaccgccattgacctgaccacggaagcggcggaatgggaagtcacggcggaccgcgtcatctactggatttttgtgctggattatgtggtccgcttctccatcagccggtccaaatggctcttcgttaaggaacacccctgggatttgctggccattattccctttgacgccctgttccgcctgttcaggttcgcctcgctgggggaaatcttaaggctcgccaggtatctggacctgttttcctatgccatgaggttcaccacgcgcatccggcgtttcttcaacacgaacggattcaagtatatctgcatcgccgccctggtcatcatcctgctgggggccgtaggcatccatctggcggagggcatgagcctgcccaacggcatctggtggtccttcgtcacggctaccaccgtaggctacggggatacctatccggtcaccacttcaggcaaatttctggctgtattcctgatgctcacgggcatcggattcgtgggaacgctcaccagcaccatcacgtccttctttctgagtccccacggcggagaaacgctgccgtaccgggaagaggaaattgaagccattaaaaagaaactggacgacctttcctccatgacggatgaggacatagacaccatggcggccctgctgaaaacccttcgggacgcctccccagcaccttcagcgggaaaagaggaaacgcctgctatccattccggaaaaaactgacaaaatccgtttggtattacattaaaaaatgccctgtccgtcccagggcaaataccaaatactcaaccgtttttcagtgagaagattttaagtctttatgttgattaccagctgattggctacctttaaaaaaaagaaacgccgcaatgacaatgttggccaaaggaactagttctaaaagcaccaaccatccgctctctcctatgtcatgaagcctcctgacatctgcaacaatattgaaatatatataagaaataaaaataatcacaaataaaactaatattcctgaatcattccctgttttatcccacaccattgcaactccataaagaagaataatagccacaattggcaatatcagcaacttcagcgcccaatattcagatctggaaatacgaccggaaaaactgacatattttcttaaaaatgaagttccattcgcattctccatttttatagaagcatttccctctatttctctgcggattttatgcatatcggaagcagatacggaagacttcaaaatctcctggacgttagctgcattacactctattcccaactcatggttcacgatgtctgcaactgacttagaacttgtttttgccaatattgcggcatctacaagtttattatatgcattaatacgggatagcctttcttccgactgttccataactttcatctttttataaatacagttactatgctcttcgctcttccctttacattactcccagcttcttcagcatggagatggcaacggaatttccctgttccgcagccagacgataccagcgtatcgcttcctgcctgtttttagcaactccatgcccaaaataaaaacacgcgcccaatcttctttgagcttctgcatttccttttttggctgacaaaaaataccagtttacggcttctcttttattcttcccaactccgtttccaaaaaaataacaatcgcccagccacctctgggcctccacatacccctgcccggcagccaggcggaaccacttcaccgcctcctgtttgtcctccctgattccttctcccccaaaataacaacctcccagaatccactgggcttccgcgttcccctgctcggcagccaaacggtaccacttcaccgcctcctgtttgtcctccctgattcctgttccaaaataatagcacctccccagactatactgagcttccgcgtttttctgttcggcagccaggcggtaccacttcaccgcctcctgtttgtcctccctgattccttctcccccaaaataacaacctcccagaatccactgggctttcgcgttcccctgctcggcagccaaacggtaccacttcacagcctcctgtttatcctccctgattccttctccccaaaaataacaatctcccagtctccactgggcttccgcgttcccctgctcggcagccaaacggtaccacttcactgcctcctgtttgtcctccctgattcctgttccaaaataatagcaactccccagcctccaccgagcttccgagtttttctgttcagcggccaaacggtaccacttcaccgcctccctcttgtcctccctgattcctgttccaaaataatagcaactccccagcctccaccgagcttccgagtttttctgttcagcggccaaacggtaccacttcaccgcctccctcttgtcttctctgattccttctccccaaaaataacaatctcccagcctccaccgagcttctgagtttttctgttcggctgccaggcggtaccacttcaccgcctcctgtttgtcctccctgattcctgttccaaaataataacaggctcccagaatcctctgggcttccgcgtccccctgttcggctgccaaacggtaccacttcaccgcctcctgtttgtcctccctgattccttctccccaaaaataacaatctcccagaatcctctgggcttccgcatccccctgttcggctgccagacggtaccacttcaccgcctccctcttgtcctccctgattccttctcccaaaaaataacaatctccctgccgcttataacaatctaccagaatcctctgggcttccgcgtccccctgttcggctgccaaacggtaccacttcaccgcctcactcttgtcttctctgattccctctccccaagaataacagtctcccagaatcctctgggcttccgcgtccccctgcccggctgccaagagataccacttcaccgcctccctcttatcttctctgattccctctccccaaaaataacagtctcccagcatcctttgggctttcgcgtttccaaactccgccgattttttgaaatatgagacagctctctccacatctcctttattcaaatactgctcccccaaattcatcaggcgggtatgatccagttctactgtctcgttctcatgggcgtatttttttccattaaatagctgtacaacactaaaagctgttaaaaaacatacggaaatgatgattgcaatcatccgccattttcttcctgcccaccgttttttctctatctctatttccggataattatttccatccgcaaatatttgtttcatgctttttttagaacaatgaaaatctatcaggaaaaacgagaacagcagaaagacgatgatgaaagataagtaagaccacatattttcagaacagtccatcaataaaaaacctacaggaataaataaggaaaaataaacgcccgcatttaatatcatactgttatacttgcagtctcctgccatgtccgctgcacggctgtcaggaatacaggcagaagatatacagaaaacaacaattcctatatagtctccccacgtcaaatgttccactattcctttccagctttttattactgcaaaatcatacagggaaacagcaataaccagtaagcacaaagccaaagcggcttgtactgtagaaacttgagtttcccttcttgaagagaataaagacaggggcagcaggacgacggaagccgcaaaagaaaaaatcaccctggcgctcaaccctcccagcgctccaaccaaaatacttaatattgcatgaagcatactcattaacaatcaatatttataccagctttcacccatttatcctgatgattccgttatttaatattaattttattattgagaatcaaataatcaatagcgccagcggcctcccttctattcattattccctgtttgacgcgcagggacaaaacctttaccatcttgtctgcaagaaccttgtccacctttccctgttttacggcttcctgaaggcgtgacagagatgcgcgaaagacctgagcttcttcttccctggtaatttttgactgggcttcatgttccgcctggttgatgattgtcttggctttggcgctttgacgtttatcccaggcggcagctcccgccctggctttggctgaagggtcataagtgctggtaattaaatccccacgatacctgttcccatattggtctgaaacggaaatcggggttatgctggttctagttgtaggcgtttttctgcttttgaaccgttcaaacctggctctggcgcttctgtcccctttcccggaatgagtgtaatagccacccgctcttcccgtttccaaagttcgagccaaaacatgttctcccaccagaaagactgttccaaatatgattaataaggaaatagaaacattcattttttgcctgttctaacggattcccaatccgtacatttatatcgaataatgtagaaaaaaatctaacatatttttatgaatcattgtttatcatctttcatttccttttccgttcctgtttgatctttatagctgttatcatcacattttagacttgtgtacggattgggaatcctctgctacaacgttcttcatgaacataccgacttcctctttccccaccgacacggatcagacaggaatcctcctcatccgttccctgggcattcctcccatggacgctttccttcttctaaaggacctcctggacaccagccgcggaagaggcgacaggataacccgggccaaacgatgcatacggctgggaggagaggctcttgccgacagggaaacaagcgtgccgttttcccaggctgtccgcgccagcctggaagcaagaaaacaccgccggccccgcaccctgcaggaaatccgctatatggctgcccggatgatgaaaaaatgcccggaactggcaagaaaacaggtccgttccatcacgccggaagattgcgagcgttatctccgcaaaagcttttccactccccgccagcggcacaaggggcggctgatcctgagcggcatcctgaatttttccctgaagcgcgggtggtgccgcagaaacgcggcctttctggttcctccccccatcctcagggaaaaacgcatcagggccctttccctgtacgaggcaaaacggcttctccacaccgcggaacagttgttccacggggcatgcctgccggcctgcgccctgatgctgtacgcgggcatacgcccccacgaagtcaaaaggctgacctggaagcacatcaacctgaaatccggcctggtttcactggcgcccagccataccaaaacaggcgggagccgccatgtttccatccttcccgtgctgggcgccatcctcagccggacatcttccgccggttccccctcccgtcccgtttgcccgcccaactgggaaaagaaatggagggaagtaaggcgccggtccggcatcctgaaaaaaagcggatgggtgcaggacgtgctgaggcatacctacgcctcctaccacctggcccatttctgcaatcaaaaccttcttcagaaggagatggggcactcctccccctccctgcttttggcccgctatcttaacatggacggaatcacctccgcaaccggcgccatgttctggacgcacagcttcattcctcccgctccgttaaagaaaaactgacaaaaatccgtctggaattgcgcggccaaagacggacaattccctgcgccgggaacgtccggcgcccctcttttttccaacctttccgccattttccaaccatgccagcaaccagccctccccgcgcctgggccgaaatcgacctcggggccatccgccataacctgaatgtcgtcaagcaggcggccaaaggggaatattacatgcccgtcgtgaaggcaggcgcctacggccacgggctggaacaggtttgccgcacgctggattcggaaggcatcgctttcttcggggtggccaatgtgggggaagcccggcgcatcagccaggcgggctgccgcacccgcccttacatcctgggccccgcgttcccggaggaacgggaggaaatcgtgctgaacggctggcgctccttcatttccaccatggaggaagcagagcattacaattccctggcgcggctgtacggaaagacgctgcccatccacctttccgtggatacgggaatgggccgcggaggattcctgccggaccagcttgaagaactgctttcccgcctgggagaactggacagcctgcatccggaaggcctgggagcacacctgccctgcgcggacgaggaccgggaaatcacgctcaggcaaatcgccctctttgaacggatggccgcccgcatccgggagaaactgcccttgaagtattgccacctggccaacagcgccgcctccctggattatgaaatcccctccaacaacatgtgccgccccgggctggtgctgtacgggttttcccccattgactccccatgggcctctcaattaaggccggccatggctcttttttcccgcctgacggtggtgcgcacgctgccggaaggccacggcatttcctacgggggcacctatgtgacggaccatcccaccagggtggcgaccgtgggcataggctacgcggacggctacctgcgttccctggcccataagggcgcccgcgtcatggtggacggggtttcctgcccccttctcgggcgcgtgacgatggatcagatcatcgtggacgtcagccgggcgccgcacgcggaaccgggcatgaccgcagaaatcatggggccgaatattcccgtgacggaactggctgaaaaggccggcaccatttcctgggaaatttttaccggaataggcccccgggttccccgccattacaattattagactttcaaccggggaagaagcccgccattccgcgtggaaccttcattccctattgacgggcatccggaaatatcgtttatttaaccgatatgatgaaggtttccaccagaggacgttacgcattgcgcctgatgattgatctcgcccaccaccgcaacgaaggctacgtttccctgaaggagatttccgccaggcaggacattaccgtacgttatctggaacagattatcgccatcctcctgaaagcgggatttgtccagagcttccggggaaaggcgggaggataccgcctttccagacatccgcgcgaatacaccacggaagaaatcctgaaactgacggaaggctcccttctgcctatttcctgcacggctccccacgaaaatccgtgcccgcgggcggcaggatgcgccacgctgcctttctggcgcgggctccagcaagtcattgagaattatttgcgccgcgtaacgctggaagatctggccgagcagcagaaggaaatcggctgcgactacggagccggcatttaagcagcggccgcgggcctgaacatttctccaccttttcccattccggcccatgtcccgttttttttacccggagcttgacatggtcttttcttttcgttatccatttcctagttttccgataggaatataaaaaccatgagcaagaaccatcgatttgaaacacgccagatccacgtgggtcaggaaagtccggacccggccaccgatgcgcgcgccgtacctatttacgccaccacttcctatgtcttcaaagactcggaacaggcggcggcccgttttgccctggcggagccgggcaatatttataaccgcctgatgaacccaaccgcagatgtttttgaacaacgcatcgcctccctggaaggaggggcggccgcgctggccgtatccaccggggccgccgcagtcacgtatgccatccagaacatcgcccgggccggggaccacattgtttcttcctccaccgtatatggcggaacgtacaatcttttcgccaatacgctggcggatgccggcatagaaaccactttcgtggacgcgagggacgttcagaatttttccagggccatccggaacaataccaaggccctgtacgtggaaagcctgggcaacccgaattgcgacattgtggatatggaagcgctggcggaagtggcgcacgcccacggcatcccgctcattgtggacagcacgtttgccacgcccttcctgttccgccccttggaacacggagcggacatcgtggtgcattccgctaccaaattcatcggcggccacggcacggtgatgggcggcgtgattgtggacggcggcaaattcgactggacgcagaacgacaagttcccaggcatcagcaagcccaaccccaattaccacggagccgtgttcgcggaggtatgcggcaatctggcctatatcgtcaaaatccgggccaccctgctgcgggacacgggagccaccatcagcccgttcaattccttcctgcttctccaggggctggaaacactttccctgcgggtggaacgccatgtgcagaacgctttgcgcgtagcgggctatctgtcctcccatccccaggtggaaaaagtgaaccacccctccctgccggaccatccggaccacgacctttacaagagatattacccgaacgggggcggctccatcttcacctttgaaatcaagggcggcgcggaaaaagctcgcaagttctgcgaaagcctggaactattctccctgctcgcgaacgtggcggacgtcaagtccctggtgattcaccctgcctccaccacccactcccagatgacggaggaagaactgaaggcggggggcattacgccatccaccgtgcgactctccatcgggacggaacatatcgacgatattctggaagatttggaacaaggcttccgcgccattctctaacgatttgacggcagcaacgctctttccctacaagccatgaaaatttacaaaaacattacggaactgatcggcggcaccccgttgctggaactgaccaattacgaacgcaggaacggcctgaacgccaccatcctggccaagctggaatacctgaaccccgccggcagcgtgaaagaccgcattgcccaggccatgattgacgcggcggaagccgccggagagctgaagccggattccgtcatcattgagcccaccagcggaaacacgggcatcggcctggcggcggtggccgcttcacgcgggtaccggattatactgaccatgccggagacgatgagcgtggaacgccgcaacctcctgaaagcctacggcgcggaactggtgctgacggacggcgcgctgggcatgaaaggagccatcgccaaggcggaggaactggccgcgggactgcccaacagctttatccccggccagttcgccaacccggccaacccggaagctcatttccgcaccacaggcccggaaatctggaatgatacagaaggcaaagcggatatttttgtggcgggcgtgggtaccggaggaacgatcacaggcgtgggcaagtaccttaaatcccgtaatccgggcatccgggtcgtggctgtggagccgttctcatcccccgtgctgacccagggcatggccggcccccacaagattcagggcattggcgcgggattcgttccggaaacgctggacacctccgtgtacgatgaagtcatcaccgtcaccaatgaagacgctttctccacagggaaggaactggcgcgcacggacggcgtgctggcgggcatttcctccggcgctgctctctgggccgccacacaggtggcgcggcgcccggagaatgaaggcaagaccatcgttgtcctgctgccggacacgggagaccgctatctttccacccctctgtttacggactgattccttccattccctgccatgaaaaaattcaatctccatctctacctggtcacggatgaagcgtccaaatgccgctacagccttctggaaaccgtccggaaagcggcggacggaggagttaccatggtgcagtaccgctccaccaatccggatgcgggaacctgttaccgggaagctttgcccatacgggatttcctggcctcccgcggtattcccttcatcgtcaacaaccgcattgacctggctctggcgctggaagcagacggcgtccacatcggccagagggatcttccggttccctccgtcagagccatgatcggcccggataaaatcctgggactgtccgtctccaataaggaacagctccgcgccgtggatgcatccctggtggactacctgggcatgggccccgtctttcccaccatttccaaactgaacgcccctcccgtgctgagcgtggaaggcttcgccgctctggcttcccaatctcccctgcctgttgtcgccatcggcggcctggacgcggaacgggcccggcaagtgcgcgccacgggaaccgcctccggaattgccgttgtctccgccatttgcggagcggagaatccggaagccgccgcacgggctcttgcctgacggacgaaccgcaggaaacaccggacaatcaagcacttttttacgccatgctttcaccgacagaccttgttcaagccgttgccgccgatctggaaaaaatccgggaaacggccccgctggttctctccctgaccaattccgtcgtccagcccctgacggccaatctcctgctggccataggcgccgtccccgccatgctcaacgacgcggaagaagcggcggacatgctccgcagcggaacaggcgccctgctggtcaacctgggcaccgtgacgcgcgaacagggagccgccatgcaaacagcggtgcgggaagccaataggctgaatatcccctgggtgctggatcctgtggccgtaggggctctttccctgcgcacgcggctggcggggcaattgaaggaacaatccccccgcatcatccgcggaaacgcttctgaaatcatggccctggccggctattcctccgtcacgaaagggccggaaagcaccagctccagcgcagacgccctgcatgcggccagggaactggccctgcacacaggggcggccgtgctcgttacagggcgtacggattattccacggacggccgccaggtaaccgccacggaaaacggacacgccatgatgtcccgggtcacgggcgtgggctgttccatgggagcactgtccgccgcctgtgccgccgtctcccccacccccttgcaggcggccgtttccacggccgtactcatgggcattgccggagaaatggcctttgaacaaagccccttccccggttcctttgccgtatcattgctggacagcctttacgccctttctccggaagacgttgtccgcagggcgcgctttctttccctttgacagtcttattttcccaggaaagcaactccgctgccatgcacacggcctgacccggaaatctccggagggggaagtacattaccatcagctgcccgggagaggggaatctccggctccctccccgctagaacaacctgcgccatattttcaggcattccgcctgcggagcaggaagcagcatgccggggacctgccgaatcccggcacagccatttgcctatcccgaccaccagagcgctggaactgcaagcggatttagtgttgagaaatacctgcggccttttataatggaggcaacccatttcagcatggcaaactccactaccacgcaaaaactctgcaactggttcattcagcaggcgaacgccaagggactcgtcctgacgcccgtcaaactgaaccatctggtcattctggcggactggtggcatctgcaccggactggcggtttcctgatcaatgaacgggtggaagcctggccttccggtccggtactcccttccatttatcatgaatacaaggatcagccgccctactcttccatagaacatcccagccgccgccagccccctttggaggaggaaacggacattattccttttctggagcatatctggaacgtctatggcaaatatacggcccagcagctcggacgcatcaacaccgccccgtcctccccatggaagcaatcccagggcaggcatgaacaggcgcaccgccagcaaatcacagaggagcacgtacaggcatactttaaaagcctggccggataattccggaaaaaacagcctgccgctttcctgtacagcctttttccaatcaaaacatatctttgagtaaaaaaaaacttgcaaaaaacagcctcttccgctttaatgcgcccgcgctgcaaaagcgcccgttacatagccctatagtgtaatcggtaacacagcggattctggttccgtattttggggttcgagtcctcatagggctaccacttctaataaaaaggccatctctccggaggcggcctttttattttctttctattaccggctccgcgccgggcaacaaggagacggcaaaaaatctggaagcaaaagatgattctttgacagaacctgtttcctccccgtttatattggaaatatggcacgtcccttatccattctcggcggcattctgctctccttctcccctccggcagaggcaacagcccaatacagcattatccctgagccgtccagaacggaactcaagcaaaaaacagctaaaactttacagcttctttccgaccaggaggctccgtccctgggaacggacgcctaccggctcacagtcaccccgcagggggcgcaccttgcttccggaggaagggagggcagaatttacgggctggcaaccctccgccagctccgggaccagctggcggagcagccggagggcatcccctgcggcgtcatcacggacaagccgcgctatccgtggcgcggcctcatggtggatcccgcgcggcattttatccccgcggatcaaggacctggaaaaaattcgtggatctcatggcctactacaaattcaacaggctgcacctgcatctgacggacaaccaaggctggaggctgcccgtgcccggctaccccaaattgaaaagcattgcatccaggcgggaggaaagcttcgaagacggaatcccccacgaaggaatatacaccaaacaggaactgaaggagctggtggcgtactgcgcagcgcgcggcattgaggtcatccctgaaatagacgtgccgggccacaaccaggcgcttcatgccgcctacccggaatttttctgctttcccaaaccggacatgaacgtgcggacgacagcgggaaacagcaaagaactggtctgtccccagaagccggaagtctggaaattttatgccgctgttttcaaggaactcaaggatattttcccgtccggcatcgtccatctgggcggggatgaggcccccacggaactctgggaaaaatgccctctgtgccggaaagcccggactaaagcaggcatgaaggacgaacaggaacaaatgagagccttttttgcgaaaacgacagctctgcttgccaaaaacggacaaacgccgcaattctggtatgaggggaacgccggcatttaccatccgggggaaacggtttacgcatggcggcaagaccaggccctccagtccattgaaaagacgaaaaaggcgggattgaacctgattatggcctccaacgaatactgttacctggattttccccagattcaggggcagcgcaactggggatggatgaaaaccaccaccctgcaaaaatgttatgaactggatcccgcttttggaaaaccggagaaagaggcaggccatatccggggcgtgcatgcccccgtatgggcggaacgcctgccggacctggaccacctgctttaccgcgcctatccccgcgcctgcgccattgcggaagccggctggtcaccgatgagcgtgcgctcctgggaaaacttccggcgcaagctggccgaccaccgtcaattcatcctcaaacgcttcaattatgatatgaagcgcactcaggggaatgaaccggccttccgctgggaaaacaacaagtaatttcaccgtttttccttatcacgcatcccttaccatggtataatcttttccgaaatagttcttcatgatgtttaaactgcctctcatcctggcctgcgccatttttcccgcccacatggcatgtgccgccgcaacggacaaatacagcgttatccctgaaccggaaaaaacggaactgcagcacaacagtaccagaaccttgaaacttctttccgaccaggaggctccgtccctggaaacggacgcctaccggctcacagtcaccccacagggggcgcaccttgcttccggaggaagggagggcagaatttacgggctggcaaccctccgccagctccgggaccagctggcggagcagccggagggcatcccctgcggcgtcatcacggacaagccgcgctatccgtggcgcggcctcatggtggatcccgcgcggcatttcatccccgcggccgatctgaaaaaatttgtggatatgatggcctattacaaattcaacaagctccagatccacttgacggacgaccaagggtggcgtcttccggtgcccggctaccccaaattgaaaagcatctcctccaaacggaaagaaagcatgcgcaacggaattccccacgaagggatgtacaccaaacaggaactgaaggagctggtggcgtactgcgcagcgcgcggcattgaggtcatccctgaaatagacgtgccgggccacaaccaggccctggcggcagcctaccctgaattcttctgcttcccgaacccggatacgaaagtgaagaccgatgaaggtgtcaccctccacctcatctgcccgcacaaaccggaagtctggaaattttatgccgctgttttcaaagaactcaaagatatttttccgtccggcatcgtccatctgggcggggatgaagcacccctggaaaaaacctgggccaaatgccccctcagcatccagtaccgggagcaaaaaggcatgaaggacgtccacgaggaattgaaggaattcatcaaaaaaatgtcctccatgctggctgttcacggcaagcgcatccaactatggtatgaaaagccgtgggccagggccaacatctacaacaaaggagacaccgtcttcacctggcgcatgggactgactccgtccaccatcacggagacgaaaaagcaggggctctccctgatcattgctgccggggaacactgctacctggactatccgcaacttccagggcaaaacaaccggggatggatgcccaccaccacgctggagcaaagctacaggctggaccccgcctacggcagaccagaaaaggaaacaaaccatatcatcggcgttcagggcaccgtgtggggagaacatctcccttccctgaaccacattctctaccgcgcctatccgcgtgcctgcgccattgcggaagccggctggtcaccgatgagcgcgcgctcctgggaaaacttccggcgcaagctggccgaccaccgtcaattcatcctcaaacgcttcaattatgatatggagcgcaccaaagaaaacgaaccgcctttcaaataatccgccctctctttttccatgagcaacatcaaatttgcacgtccgcaccgcccttccgtagaagaactggcccagggagtactggccggaaaccgcgccctgctgggaagggccattacactgatagaaagcaatgccgtccgggaccaggaatcttcccgcgccctcatctccaggctcctgccccattctggcaacgccgtccgcatcggcattacgggcgttccgggcgccgggaaatcctctttcattgaagccttcggcacttacctgtgcaaaaaagggttcaaggtggccgtgctggctattgacccgtcttcttcagtctcccgcggttccattatgggagacaaaacacgcatggaggaactctccggagaagagaacgccttcatccgcccttccccctccggcggctctttgggcggcgtagcccggaaaacgcgtgaaaccatgattgcatgcgaagccgcgggctttgacattattctcattgaaaccgtgggggtcggccagtcggaaactacggtgcgctccatggtggacattttcatgctcctgctcatcaccggcgccggagacgatctccagggcatcaagcggggcatcatggaactggcggatattctggtagttaccaaggatgacggcgacaaccgccagcgcgccgcagcccactgccaggaactgaaaatggtactccactacctgcaaagccccactcccggctggacgccctccgtcctcacctgttcctccctggaaggacgcggcctggacaccattgaagaaacgctcttccgcttccgggacagcatgaaggaatccggattctggtacagccgccgccggagccagtccctttcatgggtccagtccctggtgcatgaagccctgctcaccgcttttgaacagcaccccgccgtagcgtcccgcatgcccattctggaaaacatggtggcgggggacaaaatggaccccgtttccgccgcacatgacctgctgagccacttcacttatcccgcgcccggacattaaagaaatcttccagcaccctggcgtaaactttctttttaaactccggcagccactccagcttaaattcggctggggctatccacttgtagtcgcaaaactcccggtcatccaggacgggttccggagcgtccgcatgcagccggcacaggaagtactcctgctcctgcccaacaaaaggctgccgccgcttttcacggacatactccagcacctccggcggataatcgtaacgataccctttttgggattccacaatatcatactgggacggcaaaaaccccacttcctccccaatctcgcgccgcacggcttccaaagccgtttcccccgggtcaattccgccctggggaaactgccaagctcctttctgcccggaacgctcgcaaatcaacaatttcccgtcctgccggaccatcatccccgcaacattcggacgatacaatctttccatgccctgttcattaacatacccttttccgcatttccagccatgttccttccataaacccgttgaaaacgggcaaaaaaatcctttcacagatttccccccctacttcaaggcactccgaatatcaaccgccttccaccagaagaataagcggtataaaaaaacgaaaaacttcccgtttgcggcgggaattccggccaatcagctaaaaactttagtaatcagatattaacatactgccatttttcgaacattgttctttattggcaagtctattgttcctacaaagtaaaatatgggaaccggccttccttttacttttcacgcgttccgttaataaaactccgatcatgaaaacaaaaatgaactatttgacagccacgcttctggcaatatttgcatggggcggtacaggcgtcggtatggcaaaacaatccaaaaaggcgctaaggcatcccgttgaagacaacaaaaaatctcccggagtttacgatgcgaatcaaaatgaccgtcaaggcattcaagatgcggaacaaggccccggggacaaaccggttacgtggagcatttcccgtcccaatgccaaaaacgcgctgtctgaagtcacaaaaggaatttaccagattcacggcggaggttttccgaacataactattattgaaggacgggaaggcatcatgatcattgcccctttcgtcccgcaggaaaccatggccgagagtcttgacctctattaccggaaggcgggaaaacggccaatcaaggctgttgtagatgcacatccacataccaactattttgccagtaccaaaagaacggcatccgggctggacatagacggcatagaaatggaattcatggcggttcccggaatgggggcctcttctgccgcactgatgtattttccccaattcaaggcgcttttttatggagaggacacggcaagcgccatacatgatatctgcactctgggagtatccaaaataagggatgcaaaaaacaggtggaaagcccttgatcaagccattcagcgttatgaagacaaaatagagattttgttctcacaacaccattggcccagaataggaaaagaaaatatcaaacggttcctggccagggaatgccgcaactgcaaatacatgcatgaccggatattgaacctggttagcaaagggtattcccccgcagaaattgaggaaataatcaatccgattccggaaatcaccgggcaaaaggactatcgtcaagacgccgggacattaaggaacgttatgtctgcccatctaaaaagaggaaacataaggaatctggtaagaaatatgttgaaacagttcggttatcaaacggaacccgtattccggaatgatgaacttctcgtcaatgccggagaaccgggaatcgggctgcttaaaaactcccgcgaacttacgttgacggacactttatatgccctgactccggaactgctgttcgactatttgggcgtcagcctgaatagtgaaaaatccaaagggaaaaaactggctttcaactggattgcccaaaacggaagatcatacggcttctggattgaaaacgaagtgctgatgtaccgcgaaggaaaactggtcaaacatcccgacgcagtcatcaccggagacaggctccacttcgccctggtcgccatgcgggcaatgcccttaaagacagctctggacaaaggcatgattaaaattgaaggcaatacggataaattcagggaattgctcggatgcatggataagttccatggaaatttccatgccataacaccctgattccattacctttttacgtacgtttcaggtttttcatccggaaacaggagtattggcattttctatcaatatcatgaactgtgccagtaaatattattcaaacagtcatgtattccggcgcaagggagcaactgaaaaaagggatgacatttatccatgaacagacatgttctcccccgcaaacattcaacgatttttccttcccatacagtaagagctgatattaaatagaaagcatgaaacgattctgccttcctgttttagctctatttgtttgtgcagccgcacctctttccgcccagtccaaaaaaggagccgccgtcccgtccaccgatgactacaaccagagccagttctggataggcaattttccggaggggcagtatgtggtgcatctcagccggattgtagcggtggcgcagcacaggtatattctggacaatgcctgcatggtgtatgaagtaacgctgattaccctggggaatacgcccaccaagttttattatctggaaacgctgggtcaaaattccggtatcaacgccatcaagaatgtgactgaccgtgcgaaggagcttggggccggcgccgtcaaccgggcaacgggaggcagcattgacccggatacaaccgtcgcaaaagcttacccgaatacgaataccgtggaattccgtgtagctaccctggaacagctcaacaaaatgtatgcttcccttctcaaggcgtggcaggacgggaaagggaggacgttcaggccctgacggcttgaatcagtaattagagaacagcgccgggcggtcagatttcaatccgcgggctgcaagtacggtttttacactcatatctcatcactgctaaatgtatttcctctccatcatgtgggccttcaaagggtccgcagaaaagaggtgggtgaggccgatcgccagggcgtcggcggcatcggattccggcgtttcccggagttccaaaagagcccgcaccatgaaggcgacctgcgttttttgagcggccccgcgccctacgacggagagcttcacgcttttgggggaatattccataatacgcagcccggcttccgccgcggcaatgaccacggccgccttggccgcacccatcgtgatggccgtctgatgagactggacatagatgatgcgctccaccgccatttcatccgggttccatttgtcaatgagattgcccaaatgctgcttgatggcaagcaggcagccggactgggacacgctccggggaatggatagcgttccatagtccagggcgcgcgcgcgccggtaatccccctccaccacggcataacccgtgttgcggatggccgggtctatggcaagaatgcgcatgggatgatcttcattccatcagagagaaacatcatgtttcccccccctccttagcgcctgcggcgcttgggacctgcgggtttgggcttgcggacggatttgacgggcttgtcttccaacagggcggtgtacgtgtagttgaacccgtccagttttttgcgttcaatgggtttcccaatgaaattttccacagccgcagcaaaatccagctcatccgccgtcatgatcgtgaacgcatccccggaagcttccgcgcggccggtacggccgatgcggtgcacatagtcttccgcgttttccggaacgcggtagttgatgacgtgggtcacgccgctgatgtcaatgccgcgcgccgccacatccgtagccaccagaatatcgtattttccgctcttgaatcccttaagcgcctccatgcgttccttctggggaatgtcggagtgcatgacggccacctccccgcggtagccatgatgcttgagcatgccgcataccgcgtccgcctccttgcgggtgcgggtgaaaatcatgacggaacggaagtccgtccccttgagcagggccaacagcagttcatcccgctggtccagagctaccggataaaaggcatggctgatggtggcggccacttcacgccgggcgatggtaacttccgcagggtccgtcaggcaccatttggcaaatcccgcgatgaccggaggcatggtggcggagaagaagagggtttgccttccttcccacggacagaggttgacgattttacggacaatgggcaggaaccccatgtccagcattcggtccacttcatccagaaccagggccttgacttctccgaagcgcatggtgcagcggtagaagtggtccaccagccggccgggagtggccacaacgatgtccgccccttttttcaggtcttccgtctgctttccgtaccccacgccgccatacagcaacgctactttcaacccggtgaattcaccgtattcggcaaaggattccgccacctggtcggccagttccctggtgggttccagcaccagtatctgaggtttgccgatgggctgaatccttgtcagcagcgggagggcgaaagcagcggttttccccgtccccgtctgggaggccccaatgaggtccctgccttccagaatgatgggaatggcctgctcctgaatgggggtgggatgttcataaccgcatttctccaccgccttcaagacgggttccgataaacctaattctgaaaataacattgatcttgtatgcttgctaaagagtagaacacgattccgtacagcggcgcgggaatcgcggtcaggagatgaacggattggtcagcagttcgtttttcacgttggtatatggaccgtggcccgggaaaatcatggtcgtggcgggctggttgagcactttcttttcaatgccctgtttcagcaggcgcaggtttcctcccgggagatccgtccgcccgatggagccggcaaaaatgacgtcacctgtgaacatgattccttcatccggcaaatcgtaaacaatgctgtccggagaatggccgggcacctggtggagatgccacaacaggccgccccaattcgccgtgtgaatgtccggagtaagtatttcatccaccacaaacggctgaacattgaggggaagcccccaggcgtcgcgggccattttttccagcgtcaggctttcattgtaaggttgcccggcatgaatgcggcagtcgaaaatctgtcgcatgcggcaggcatcctccacatggtcaaaatgctggtgggtgatgagaagatccgtgataatgatatcgggctttttggaatagatccagtccgcaaagccggacggagcgtccaccgccacgtaagcgttatccctcgtcttaaagaggtaaccattacaggaagcaactccacccgtataaacgcgaatccgatccatgggcagggattgtagtgagattgcccggaatatccagtataaagacggttcccttaaatagctttctgtcatcttcccctggaaaagcccctcatatcagtctccagggaatggtgcatccggcatccatcggcaccactttctgtccatgcccttcataagcgtccggcaccagcatttcacgccgctgcagacggaccgtcctggcaggcggattcaacccgtacaaagcgcaggcatgaccggaaacaaagccctgcaaccggtccagggccccgtgttcgtcaaacagggccgccagacgaggaagagcgatgggggcggtaaatacgccggcggcgcatccgcacgcttccttggcatggatgggatggggggcggagtcactgccgaacatgaggcggggatgcccggaaagggcagcctgcaacagggcttcccggtcttccggccttttggcgatcggcttgcagaacagatgcggcctcagcatgccaccggccacatcgtccaaagtaatgagaagatgctggagggttaccgtggcggccaggttttcaaattcgtccagcagctgcacggcggcggccgtggtaatatgttccatgcagatagtcagccgggggaagcgcgtagccaaatcacggtaaacatccaggaattcggcctcccggtccatcacgaagccgtggctttcgccatgcaccagcaaaggaatatccatttcctgcatgatggacagggtagcttccgcatccttcatggccttcacgccgccctcgctgttcgtggtggctcctgccgggtacagcttgatgccgaacaccagttccttgagccgggacaattccttttctgaataggagcggaaaaatgccgtcatgtacggctggaatacatcgtctctgcaagcgtccagcacccgctgccggtaagcctgcaccgcacccgcatcagccaccggaggcaccaggttgggcatgatgaccgccccggcaaaagaggcggaacttaacggagcgaccagcttcatcatatcgccgtccctcaggtgaagatgcatgtccaacggggagtgcagttccagaatcatgccgacatcatgagggaagattgcgcccaaatcaagcacgctcccctgccctgcaggaaagcaattctccgacggtaagggaaaacgggcattttcccgcaaaccggaagggatgcggtacgctttgctgctgttgctacaaagcaaaatcgccgggaaacgaatcgtaaaagcaaattctgtcccaatgcctcagaaaaacgctgttctcccggacggctttcttgaaacagcagacggaatgcaggaacagtaaaagtccgaatgcaaaaaagccgcccggaggcggctgtttttcctgaacaaggtggcgaagcggacggggctcgaacccgcgacctccagcgtgacaggctggcgctctaaccgaactgagctaccgctccataaccttggatgccgtccctgccttgcggcggggacgtggaggcttatacacgcctttataccccggtgacaagaaaaaaagactttttttgcaacttctgcaaccgtcggcggtttgtacggtgaagaaaccgtaacttttcagttacccgatttatttcaatacagcaataacttctcaactttatttgttttagtttgacaacaattaaccggttttgacataacacccccatgcttcagactgccgcggatatcacagcctccgttcacaaattcgagacgatccttcaccagttcaaaagggataacctgaatgaggtggaccagagccattaccagaaaatcatggggctttccgtccggcagatgaacgccctgggtgccctgaaccacctgatgaccaaccgccaggaaggcattcccctgaaagagcttgcccattatctccgcatgagcattccctccacctccctgctggtggacagcatggtgaaaaaaggcctgttcgaccgcaaggagaatccccgcgacaggcgttccctgtgcatccgcctttccgaggaaggcgaatccaggttccagatgcttttcaacggcatgaaggaaaaactggataccctgttcagcactctgtcgcaagaggacaaggagaatttctgccgtattgtggataccctttacaaccacgtttacagtaaataataccatatgaaaaaacacacgcatcatcggaaggcgcccctccgcctgctggccggttccggcctgcttttttccctgtttgttccgggttattcccaaggaactccgggaggggctgcagccaaacccagtaccgtactcgtccagaaagccgccgctattgacagcgcggtgaacaagaagtacatcggtcaggtggaagccattgaccgggtgactgtgcagccccgcgtctccggcaacatcgtagccacccgtttccgggaaggaaaggtcgtgaagaagggggatctcctgttcgaaattgaggatacgcgctacagggcggctgtggaggaagcggtagccaaaaaggcccagcttgaagccaaactgctttacgcaaaaaatagttttgaacgctataacaggttgctggcctccaaatccgtctccatggacacggtggaaaacgccaagagcaccatgcatgccctggaagcggaaatccagtccgcaaacgccgccattacggtagcgaaggacgatcttaactataccaggctcacggctcccatcacgggccgcacaggccgcgtcaccttttccacgggcaattacatcacccccacctccggttccctggtgaccattacaggcatcgatgaagtgtacgtgaagttccctatcagtgaacgcgatttcctttccctgttcggcacccaggaaaatatgaagaaagacgcccttgtgtccgtcaacctcgccaacggcaaggcatacgaccagccgggcagaattttcatgacggacaataccgtccagacgaccacggacaccctgaatgtctgggcaaaattccccaatccggaagacgtgctgacgcccggcggcgtagtcaccgttaatctttccaagaaaaacgtggaccgcttcccggctgccaacatttcctccgtgatgcacgatgcctacaagagctacgtttacatcgtcaacgaccagggcgtcgtggaacgccgggacgttacgctgggcaacacggtcaataatgaacagtgtttcagttccggcgtcaaggaaggggaagtcgtcatcatcgacggcatgcacaaggtgcgtcccggcgccaaggtgaatccggtatattccgttcaaaactgagctacccatgattgcggacctgtttatcaaacgccccaaattcgccatcgtcatcgccatcctgatgatgctggctggcggcatctgcctgaaccagctccccattgcggagtatccggaaatcgcgcccaccagcatcaacgtgcaggccacctatacgggtgccagcgcccaggtggtgatggaaacgctggcctcccccattgaggaagaactcaacgggctggaaaacctgctctatttctcctccaagtcagataacaccggcgggtattccctgtccctgacgttcaagagcggcacgaattcggacatcaacatggtgaacgttcagaacgccttgaaacgggtggaatacaaacttcccaaggaggtgacggaccagggcatcaagatcaagaaacgctcctctgacatcctgggattcttcgctttccggtccaccagcatgagttccctggagctgaacaacttcgtcaagaccagggtgaaggatgaggttgcccgcgtaccgggaatctctgccgtcaacctgatgccggaaaagaattacagcatgcgcatctggctggacgccctgcgcatgtccgccctgaatatcacgccggatgacgtttccaacgccatcaaggcgcagaacgttcaggccgcggccggctccatcggctcggaaggggaaaacaacttcatccaatacaaggtgaacgtcaccggacgactgcagaccgtggaggaattcagcaagattattgtccgcacgggccaggatggccacgttacccggctggacgacattgcccgcattgagctgggcgcggaaacctacacgggcagcagccgcaacaatggggaagactccgtgaacatggctgtgtaccgcctggatgacgccaatgccctggaagccatgaacggcgtgaaagacacgctggagaagctggaaaaacgtttcccggaaggtgtgagctacgtcgtgagctacgaccccacgcaatacatttccgccaccatggcggaaatcgtggaaacgcttgtcatcgccctgattctggtggtgggcatcacgtacctgttcctgcaggactggcgtgccacgctcattccggcgctcgccattcccgtctccctgataggcaccttcgccatcctgctgcccctgggcttttccatcaatgtgctgaccatgttcggccttattctggtaatcgggtccctagtggacgacggcatcatcgtagtggaaaatacgatgcgcattctggagacggaggatctctcgccggaagaagccaccaggaagagcatgcaccagattacaggcgccatcatcgccaccacgctggtgacggtcgccatttacgtgcccatcgccttcttcggcggcatggtggggaacatttacatgcaattctccgtaaccatgtgcgtggccctctgcctttccgccatcaattccctgacgctcagccccgcgctgtgcgttctgctgctgaaaaggaagcaaaagaaacagagcaggttcagcctcttccgccccttcaatgtctctctggaatgggcgcgcaaaagctatatcaaatgcgccggcatcatggtgcgccgcgcgtggcttacgctgattctgctggccgctgtcctggtcggcaactggaaactgtttgagaccgtacccaaatccttccttccgccggaagacaagggcaccgttttctgtgatatccagctggcccctggcgccacgctgggccgtacggaacaggccatgcgcagtgcggaacagaagctgatgagcatccccggcgtgcgccaggtttcctccacttccggattcagcttcatgggcggcaacggggaaaacctgggcatgtgcatcgcccagcttgacccctgggacaaacgcaagacgccggagctttccctggattccatcatgcagaaagcttccatcctgtgtgatgaaattccggcggccaaggccaccgtgttcagcccgcccgccatcatggggctgggcctgacgggcggcgtctccttcatgctccaggccagcggggaggaaactcccaaggacctggaacgagtgaccaacgacctgctggacaaaatcaacaaactgccgggaaccatgtacgcccgcagcgcgtatgaggcgaacaccccccagcttttcctgaacatcgaccgtgaaaaggcgcagagcatgcacgtgcccgtcagccgcatcttcacgacgcttcaaagcaagctggcctccatgtacatcaatgatttcaacctgatcggctacacgttcaaggtgaagatgcagtccgcggcagaggaccgcaccaccatcaatgacatcatgaacacctacattcagaacgatcagggccagatggtgcctctcagctccgtagccaccctgtcttacatggtggggccgcggcaaatatcccgtttcaaccagctcatgtccgcagaagtgaccgcccaggcaaaacccggcgtcagcagcggcgagctgatgaaccagattgaggctattccgctgccggaaaattactccatcacctggacggacatgagctatcaggaacggcagaacgatgggaaaatcgtcctgctgatgggtatggccctgctcttcggctacctgttcctggtggcgcaatatgaaagctggacggttcccatttccgtcattgtctccgtctccgtcgccctgttgggcgctttgctcggcctgattatctgcaacacgcccctgagcatttacgctcagctcggcctggtgatgctggtgggcctggccgggaaaaacgctattctgatggtggagttctccaagatggagcgggagcgcggcgttcccatccaggaagccgccctggaaggggcccggcagcgcttccgcgccgtgatgatgacggccatttccttcatcatcggggtattccccatggtcatcgcctccggagcgggcgcggcaagccgcaaagccattggcatctccaccttctacggcatgattctcgcaacagtagtgggcattctgttcattccggccctgtacgccatgttccagcgttaccgcgaatgggtgaaaggcctgtttgccagaaaggcggaataaatgtaaaggaagactgctccatgaaggacggggcggccttggccgccccgtctttttcttttttatgcttcagcgcctcccgcggagttacggacaagagcggctatttgacctgctcgtacaaatacaggtcaaaatcttcaaaatgttccttcaggacgacacgctccagccggttctcaaatggaggaagaaaagtatccgccggatattccccctttactttggaaacccacatgcgggacatggccggcatcatcagggaaaaaatctccgcacccccgatcaccatgatttccgggtccatcaattccagacattccaactcccctgcggaatgaaccacctgaacgccttccgccgtccacgccgggtcacgggtcagcacgatgttctgcctgtcgggaagaggcctgcctatgctctcatacgtcttccggcccatcagcacggggtgccccgtcgtaatgcgcttgaacgtcttgaggtcgtccggcaaatgccaggggagcgccccccggtaaccaatgccgcggtcgggagccatggcgaccactcctgtataagtaacgggttgtgacatgatggattaagggatgaatgttctaaacggagatgggagccttgatgtgcggcaggggatcataccccacgagctcaaaatcttcataatggaatccgtcaatggtttttacctccggattgagcttcatgaccgggagaggacggggcgtgcgggagagttgttccctcgcctggtccagatggttccggtacaggtgcagatctccgaacgtatggatgaattcccgggcttcatacccgcatacctgggcggtcataagcaacagcagcgcataggaagcaatgttgaagggaacccccagaaaaagatccgcgctgcgctggtaaagctggagggaaaggccgtgctttttttctcccggctgggcgggaatcacgcaaaactggaacagggaatggcacggagggagggccatgtcatccaccagggccacattccacgcactgacgatgtgcctccgagaccatggattgtgtttcaggccgtcaaccagtctggcaatctggtcaatgggtttgccgtcgtttcccggccagcagcgccactgcgcgccgtacacgggccccagatccccgttttcgtcggcccattcatcccagatgctgacgccgttgtctttcaaaaacttgatattggtctctcctttcaggaaccagagcagctcataaatgatggagcgtaaatgaagcttcttggtggtaaggcatggaaaaccgtcgcgcaaatcatacctgctctgccgcccgaacacgccgatagtgcccgttccggtacggtcctcccgccccgctccattgctcaggacatcctccaaaagtgccaaatactgcttcattcccttaaattacgcttttctaatccctggacccgtgataatacgagcatgcgtcaccttagtatcatctcctgctccaaaagcaagccttttcacttctccccgccgttttcatcccccgcatcttttccggttttccgttccatgatcattcctgaagagccatatttgggatttgccgccttttgccacattgcaggcgccttctgcctgattccggccctgctccatacgcgcacgcctcagggaacaatcgcgtggctcatttccctgctggcatttccatatattgccgtccccttttacctgatcctgggacgccggagattcagcggatatgtggaaacgcgccgccgccagacggaccccgaatccgcatggggggaactgacggataaaattacaaactgcatggttccgtatgccgtacagtcatccgacacggcgggaaaaatcatgcacacgctttccaatatcgtgcggctgcccgtctgccgcggcaattcctgccgcctgcttattgacgcggccaacgctttcccgcgcatctacgacgccatcaagaacgcagagcattacatcctgattgaattcttcatcatcaaaaacgactccgtggggcagaacctgaaggacctgctgattgaacgggccaaggccggcatccgcatttacatgctgtatgatgaaatcggctcccacaagctcccccccggttacatttccgccctgcggaaagcaggagtgaacattgaacctttcaacgggaagcgccatttcctgagcaacatcctgcggctgaacttccgcaaccaccggaaactggtggtggtggacggttccaccgccttcatcggaggcatgaatataggcagggaatacctgggcaagggagctctgggctactggcgcgacacgtttgtccagcttgaaggcccctccgtccagcaaacgcaaatcagctttctggaagactggaactgggccatgctgaaatgcggcccctcctcccttccccgcctccgctgggaaatcacgccccagccggaggatgaaaccctgctcatcctgccctccggccccgcagacgtcattcccgcctggaaaaccgcgctcatcgccctggcgaacagcgccacccggcggctctggatatccaccccctacttcgtcccggacgagggagtcatggccgccctgcaggcggcggccctgcggaacgtggatgtgcgcatcctgcgtccggagcgggcagaccatattctggtgaaactgtcctcctttactttccttcgggacctggacacatacggcatccagctctgggcctatcaaaaggggttcctgcatcagaaagtagttctgatggacgatgacatagccaccgtgggaaccgccaatctggacaaccgttccctggccctgaactttgaaatcaccgccgttatccattccccctccgcctgcgcggaggtaaaagccatgctggagcaggatttttcctcctccaagagggaatccctggcggattacaacaataaatccctgggcttcaaaatgctctgcaacctggcgcgactgacggcccccgtccagtagttcttccggcgaatccgctgttgtatgcttgacctgcaagggaggctgtgagaaaatcaccctccagaagccacctcttcaatttttaacaacagttaactaaataatgaatcctgttacattcaattgcaccgttctgcgcgacgggcatcaatccctggcggcaacccgcatgaagacggcagacatgctgcccatcgcccccattctggactccatgggcttcagcgccctggaaacctggggcggcgccaccatcgacgccgggctgcgcttcttgaaagaatggcctttcgaccggctggacgccctgaaaaaagcggcccccaagacgccgcacatgatgctgctgcgcggtcagaatatcgtgggctacaccaactatgcggacgacgtggtggaagcctttgtcgccatgagcgccaagcacggcatgaacatcttccgcattttcgactgcgtgaacgacccgcgcaacatggaaacctccatccgcgccgccaagaaagccggagctcaggcccacggcaccatctgctacacgacttctcccgtgcacaccacgcagacttttgtggacatggggcgggaactcgcggatatgggagcggacgccatcgtcatcaaggatatggccggcctcattcctccgtatgtcacccaggaactggtcagcgccctgaagaaagacctgaacatccccgtctggatccacacgcatgacactgccggcctcggcgcctccacctacctcagcgccattgatgccggagtggacgcgtgcgatgtctccatctcccccttcgccaacggcacgggccagccggactgcctgcgcatgcttgccttgctgaacggcaatccccgcaagccggattacgacgcggacaagctcattgaagtttccgaaatgctcaaacccgtctatgaaggtctgggcaaattcgcctcccaccgcaacgaagtggtggactccgacacgctccgctaccaggtccccggcggcatgctttccaacttccgcacccagctcaaggaacagggcatggaagacaaatttgaggaagtattcgcggaaatcccggtagtccgcaaggctctgggctggattccgctggtgacccccacctcccagatcgtaggcgtgcaggcgatgctgaacgtcaagttcggccgttggaagaacatcaccccccaggcggcggacattgccctgggctactacggccgcacctcggctcccgtggacccggaagtgcagaaactctgcgcggaaaagatgggcaaggacccgatcacctgccgtccggcggacctgatcaagcccggcatggaagacctgcgcaagaagcttgcggaaaaggggctccccacggacgacgaacactgcgtcatctacgccatgttcccgcagcaggtggaagacttctacaaaaagccggaacctaaggaagaagcccccgtacaggtaaacaccgctcctgccgcaacgcctgcgtctgccgcgccgtccatgaccgtcattgacaacggaatcaccgcccgggtaagcggcccttccggttcccgtgacctgaccatcatcatcaacggccaggcccactccgtgaaagtggaacgcatcggctaaaatctccgaagcatctgatcaaaccgtttgcgggcagcccctccataaagggactgcccgctttactgtttattgagaaacggcgttttcgtcacagctcccgttattcctaaaaaccagcatctttccggccagtgtctggctgagaggctttgccggaatacttttgatggaaccggacttgatggggaatggaagagggtactcacatttacaggaagtatctgtattcgttttgcactgaacataattcaatccctcaatgggaatggaaaaagaataagaggcggcaggaattttaccccaatactgttcttccacatccttgatggctttgttgctttcctccaattggctcaagttaaaaacatgatcctttccccaatgacaggcaactgcggttccgtctacttcccagacgttcagtaaaacgcaccaatgagcgtgaattcctgaatgatcgggtttgccagaggcatccacgcaaaaaggaaccatgcagaggcctccgccattcagcgtttcaatgatggaagtgacgtcacaggcaacagactgacacttgattttggacggggccagcttctctatataagtggccatgcttgaagtagcgtcatataattctccaataacggttttcccgtcctttttgaacttgttcctcagggactcactagtcttgtccccgtctgccgtggcggggattttaatatcataaagatattctaggacaaaggacaaggcgtagagaccgcaggtcggcccccgctggtccttgaattcaacgttccggccttccggattggtaactgtaatagacataattcaataatgatggcgtggggattcatttcccgcacgccatcatcacatcaccggaacgcgcttgacgcacgctccgccatgcctccgaccatgtttactttccggaacatcgcattcctcctctcggaagggaaatgcttaggaaacttaattctcccagaaagccgcccttttaatatcgggaatgaagaagatgaaagttattcccccgcctgcctcatcagggaaaattcccgcctggtagtgcgccttacgcgccagagcagcagcaccgccgctactgccaggccgatgatgaatcccgtccagatgccccgcgctcccatggccgggacaatccagtccgtacgggcaaggatgtagcacgccggaaatcctaccatccaataagagaaaaacgtaatgaaggtaatggacgccgtatcccggaatcctctcagaaccccgacggaaagcacctgcaaacagtccggaagctggtaggccgccgccagaaccagcaggacggaagccgtgctgacaatcagctccgagtcattgtacaggtgcacgatctgctcgcggaacagggtgatgcctccaaaggtgcacagacagatggtgagcaccagcacataggaagacagaatggcggatctggtgcctgccaggtcattcctgccgtgatggtacgccacgcggatggaagccgccagccctacggaaagcgggagcatgaacaccaggccgcccacgttcccggcaatctggtggctagccacctgcgtctctcccagcggagccagcaccagagccgccgcgcagaagagcatcacctcgcacagctgggaaacgcctataggcacgcccagccgcaccaggtgcgtgatgacggaaggcgtaggccgccgccaggaaatgatgtgcctgcggtacggcctgtgcttgggattgaagtaaaccagcaggaacatcagcaggaattcaatgtagaaaatgactgccgtggccgcaccgcaccccgctccacccatgcggggaaaaccgtacatgccaaagacgaacatgtagttcaggggaatgttgagcaacaggccgcacaatcccacgtacatggcgggacgtgtcatgttggagccttcgttcaggctcttcagggccacgaaccccaggttggcgggaaggccccacataatggcgaacatgtaggcggaggccatctggcacatggcggcgtcatcggaaatccagccgaacacatttctcaacacataaatgaccggcatggaaaccagactgagcatgaacgccagccacaggccgtggttggtcatgtagcccacgcggctttcatggcttttcccccgcatgttggcaattacggggccgatgatcatcaacacgccgcaggcgaagagagccacgggcaggtacacggaagaccccagggccacggcggccatgtccgtcacgccggcgcgcccggccacaatagcgtccaccgcccccatgcccacaatggagaggttgaccaccagcaccggaagggccagcggtatcaactttttcatttccttcaaattccacgtcttattcatttttttattcccttccatgcatcctcactcaaaaagccggaacatgccggcaaacaagccggaccagagcggcaggctccaatccggctttaaagttaaaggttgccaaccgtaccgggcctcccgccccgtccgggcattcagcggtcaagcaccacacgagcgcattgttcagccacctggcggaacgcggcggaaaccggattctgcccgggctcttccagggccacggggcggccttcgtccccgccggagcgggtggaaatatccagcggaatcttgccgagcaggggcactcccagcttagccgcttcccgttcgccgcctccttcgccaaagatatggtaaatcttgccgtcagaggggcactggaaataactcatgttttcaattatgcccagaatgggggtttccacccgttcaaagagaccgatcgccttgcgggcatcaatcagcgccacttcctgcggggtggtcaccaccaccacgccgtccagttcggccgtctggacaatagtcagctgaatgtctccggtgccgggaggcaggtccagaatcagaaaatccacatccccccatgccacgttgcgcaggaactgctggacgtagcgtgtcgccaggggaccgcgcaccgccacaggatcggattcattaatcagcagccccatggaaagaagtttcacgccatgggccgttaccgggataaattcgtcattctcattggctccggggcgttccttggtgccgaacatcagggacatggaagggccgtaaatatccaggtccaccagaccgacggaataccccagcttgctcagagccaccgccaggttcgcggaaacggtggatttgcccacgccgcccttgccggaagccacggcaatgacatgcttggctccgggaacggaggatttccaggtagaggggtcgtcattgattcccttcctggcttccggagccttatgctcgatattgacgtcacaatgcttcacgccgggcaaatgtttcatcacgccgtgaacgccttcaaaaatgtaacggggaatatccgcattcttgctctcaatcactaaatcaatcgtgacgttgttttcagcgtcaatgtcaatctttttcaccagcccgaaagatacgatatcacggctgaaccccggaaattttaccgtggtcagcgcagcccgtatcaattccggagtcaattcctgttgtgtcgtcatatatctgaaatattcatggttgcatcaacattccggccccgtgcctccggcatgcagaatgctccggaatatgaaaaaaggggacggcaaaaccgggaagtaaaaatactcccttttttatttttgacaacgcctaattcagacaaaacggctttttgcccgccggatttgcaatgacccggatactaagaaatggcgggacggccgcagccccgctattggtgaaataaaaaacaggagggagggggaaaatttattccccctgctgcttcagtgtctcccggatatcctggagagcggcgatgaaatcatccaaaatttccgcaggcaccataatccggtcccggttggagctcaccttttccgtaatacgcaccactttgccgcgcgcattctgtttgagatcaagaaagaacgtcttgcgttccgcaatgattttttctgtacaaataatatcgtcctccacggctgtaatctacctctggttgaatgaggatttcaggataaagcttccccgctggcgggtcaatgttttatttaccccggcagatgcggccgggaagcaaaaaccggaaaaataacggtatttttccggcagggcatccgttcttcgggcaaactggcagcaatccggcgtcccggcgttaactgcggcaacgtgattgaccaacatgaatggagaacaggaaagaacacaggagccgtctcaaaaaagaacactgtcgcccgggcctgttcacgaagctcattgatcctcttcctgttcattttgagccatccaaccggcaggaggagctttttccgcccttcagcttccggcccgccccacgcaagggaacgggaagaaaatggaaaagccatgagaaccgcccacgtcccccggaaaggagcgccgcccatcagcattccgcacgccatctggcctgttccgtcttgtagagcttgtacgtgacggcgtccgccagggcttccaggctggcctcaataatgttgtaggaaacgcccacagtggtccaggtggcgacgccgtccgaggactcaataagcacgcggacattggagccggttccgttttcatcctccgcctccggaatgttcgtccgggtgggggaaagcacgcgcaccttgtagtcgatgaggtgcatctgctccaattccggataccagcgcgtcagggcgcggcgcagagccctgtccagcgcatgcacggggccaaagcccccggcggcggtgtgctccacattgccgtggacatccagcttgagggaggcttccaccatcatgtccgggtccatttcatggcgtgaggtcagcaccacagtgcgcaggatgttgaaatacggtttcaaggcattgtccggcatgtgccgcaggaagagcagctccgcgctggccggggcggccacgtaatcataccccagcgcggcatttttcttcacggcggcggaaagcacgtccagaagggggtctcccttttccagttcaaaacccagggtgcgggacagggaaaggatgttgctcctgccgccctgctccgtcatcagcacgcgctgggcgttccccaccagggaggggtcgatgtgctcgtacaaagcggcttccttcatgatcgcgctgacatgcactccgcccttatgggcgaacgcggcgttccccacgaagggctgccgccggaaaggcgccagattggatacttccgagacaaaggcggcagtggatttgagccgcgtcagggaggcgccgctgaggcaggaaaagcctttcatcttcacctggaggttggggatgacggaacaaagattggcatttccgcaacgctccccgatgccgttcacggtcccctgcacctggatggctccgctgtttaccgcggccaggctgttggcgacggccagttcacagtcattgtgggcgtggatgcccagaagggcatgcggcaggcgttccctgaccgtcctgataatggagctgatttcctccggcatggtgcctccgttggtatcgcacagcaccaggcagtccgctccatgttcccaggctgtccggagcacagccagggcgtattcctgatcccgcttgaagccgtcaaaaaagtgttctgcgtcaaaaaaggcttcttccatatttttcttaaggaaggaaatggaattgccgatgatttccagattacgttcccgggaaatgcccagggccacttccacatggcgggggcaggatttcccaaaaaccgcggccacccgcgcaccgctggatatcagggcggtcagcgtggggtccgtctccggagtatgggaaggatggtgcgtgcttccaaaggcggccagctttgcattccttagtccgacacctctcatggcgttgaaaaattccgtttccaccggattggcgccgggccagccgccctcaatgtaatccatgcccagataatccagctggcgggcgatgcggaccttgtccgtcgcgctcaaattgacgtcttcactctgcgcgccgtcccgcaacgtagtatcatagagaaagattttggtggacatccccttgattcatacatgcaaacgggaagccgttcaagaccgggccccggcttttcccctgatgcagacacgaaaagcgcaaggcttgaaggagaaacctgcttccggtaggatggccgccatgagtttactcaggcagtctcttcatctctttttcctcttcctctccgtggcccttccctccccggcggccacttccgcccaccctttcctggacagggagcgtcccatccgctggagccggctgacccaggacaagctggaaccggatattcaggaagccatgcgcctcacccggacagccatagaggaaatcagccgcctccgtccggaagaaatgacgtatgaaaatacgttcggcgcgctggagaaaagcaatgacctccttacggaaggcatgtgcaaggcttatgtcctgaaaagcctgtgcgacagcggggaacttcgcaaggccatggattcggtcgctccccgcgtgtccgccttcctttcctccgtcacgaaagaccaggccctgtggaaagtcctgaaaaccgcggaggaacgcctgcggcaaactcacctgagccccgaacaggaacggtacatggaactaagcatgcagagcttccgggataacggcgcggatctgccgccggacaagcgcgcacggcttgagtccattgacaggaaactgacgctcgcctcccagcgtttcaacaatttgtacatggatgccaggaaatcctggacctggacggtgcggaacgccgcccttctggaagggatagacggaagcgccctgcaacaggcgcgtgaagaatttctgaagcgccatcccggccagtccggtccgggctggacgttcacgcttgattccgcggcttccgcccgggtcatggaaaaagcccggagggaagaatgccggaaagatttatgggaacaccgccagtctctggctacgggagcatgcgacacggaacccgtcatcagggaaatcctctccctgcgccgtgaaaaggcgcatttatgcggatataaggaatacccggattacgccctgcgcgagagcatggcggaaaacggggaaaacgccatgaagttcgtcaatgagctgctggacaagatcaaggccccctttttccgtgaaatggaaacgctccgcagcctgaaggcccgccttacggggcaggaaaacgcccgcctgaatccctgggacgtggcatattacgccaatctccgggcagaagaacatttccggctggaccaggaggagctgcgccgccactttccccttccccgcgtgctggacggcctgttttccctggcggagcggctgtacggcatccgcgtgaaggaagttccggcgcggcagtccctctccggcatcccggcaggcgaatccgccggaaccgtggaagtatggcatccggacgtacgctttttcacgattgacgacggcaacggcaaccaactgggttccttttacctggatcttttctcccgtagcaataaacgggccggagcgtggatgaacaccctggatacgggcagcccgtccacgccggagaccccgggcaagccgcgcctgggcatggtctgcctcaatatccatccccccgcggcaggagacacggtgatactgtcccaccgggaagtcaggactttattccatgagttcggccacttgctgcacctgatgtttaccagggtttccattccttccctggcggggaccagcgtgccgcgggattttgtggaagtcccctcccaattcatggaaaactggtgctggcggccggacgtgctgaaaagctttgcgcgccatgaacgaacgggactccccattccggaggaaatgctgaactctctggacgcctcccgcggcaatacgcctgccctcgcgctggccgggcagctcctgtacgcaaagatggacctggccgtgcattcggaaccggaacgcttctccgccggctctcttgatgatgtggattccgccgtagcgggagatatggattatttcaaagatttcaaaagagccggcaagctgcgcacggcgcgtcacttgttttcctctcctgcgggctatgcctccttttatttctcctaccaatgggcggaagttttggacaaagatatttttgaagcctttgaacgggccggaggccaggacagggaaacggcaggaaaattccggaaaaccattctggaaaaaggctatgctgtcccgcccatgcggcagttcatggatttcatgggaagaaagccgcgcatggatgccatgctccgcaagaggcggctggcattctgaaataaaggagccccaaaccgcagcagcctcttccgcgcggcacagaggcaagtcacatattatacatttgtttaattaaattatcccttcattatgcaaaggttacagatattttgcagaattcagaacacatctttgcgttgactttgcaagaaaaagaagagaaaattcttccgctttgccgcatcttccggcaccagccgcaaccaaccgcattcatttatgtataataagcctttgacgtttgccgcaacaaccctgctcctttgctccccggtgatgatattaacttcctgcgaaggggaaaaggattccgcagcccaggcgccgacgctcgttcccgaagtgcaggtgaccaaactggtcacgaaggatgttcccatcaggcaggaatgggtgggcaccctgcgcggcacggaagatgccgaaattcgctcccaggtgacgggataccttctttccaaggattaccgggacggcgcttatgtcaagaagggccaggtgcttttccagattgatccccgcccgttccaggcaacgctggaccaggcccaggggagactggaacaatatgaagccacgctgaaaaaatacaagctggacgtggaacgctacaccccgctggtgaaaaccggctccgtcagccgcaagcagctggacgacgccctgcagcaggtccaggaaacggaagccgccatcgccacggcaaaggcccaggtggatgaagcaaaaatcaatcttaaattcaccaccattacagcccccatttccggcctggccggcctggcaaccccttccatcggcaacctgctgacgccctccagccccacgccgctgaccaccatttcctccattgaccccattcgggtggatttctccgtaagcgaacgggacttcctgaactccatggacaataatctgaccaggcagaagcacctcaaatttgacgtgattcttgccaacggcacggaatatcccatgcagggcgaacccgtggccattgacaggaatgtggatgcccagaccggtaccatcaacatcgtcgggcatattcccaatccgaacctgacgctgcggcccggcatgttcgtccgcgtccgcgccacggtgaaaacgctggaaaacgccgcgctggtgcctccgcgcgccattctgtccgcccagagcgccaaattcatcatttacctggatgacaagaacattccccacatgcaggtcgtcaacctcggccccgttgttgacggcatgcaggtaatcaacatcattcccatgccgcactccaccttcacgaaggacagccccatcgtggtggagggaatcatgcaggcggccaaggtgcagggacaagcccccgtcaagccgcttccctacaagcccgtagtttcccagcccgtcatgccctccataggggcccagtcctttgaaaaggccaggacgccagaaggcatgaaggatggagaagcccagccgtccgccaagtaacctcccttatccggagacccaccatcttcccttttcccgcgcattttcatgatttaacgccatgtccagcttcttcatcaaacacccgaccattgccatcgtcatctcgatcgtgatgatcctgctcggcggcctgtccctgatggggctgcccattgagcagtatccgaacatcgtcccgcccaccatcaagatgcaggcgacctacccgggcgcgaatgcggagacggtggccaattccgtagcctcccccattgagcagtccatttccggcgtcgtggggatggattacatgacttccaccaacgccaacaacggcatttgctccctgagcatcgtctttgaagttggcacggaccccaacatggaccagactctggcctacatgcgctacgggcaggccaccgcccagattcccgcggaggtctcccagatgggcatcaccatcacgcagtccacaggcagcccgctggccgtaatcaacctgtattctccggatgacagcctgaacgccatcttcctgagcaactatgcctacgtgagcctggtggaccccgtgaaacgcgttcccggcgtgggcgacgtgcaggtgttcggcgcaggccgctacgccatgcgcatctggctggacaccaccaaaatggccgcccagaacatctccgtgggagaagtccaatccgccatccaggcgcagaacaccgtgattcccggcggccagatcggcgcggagccggcccctcccggaacggaattcacatacagcatccagaccaagggacgccttcagacggctgaagaattcggcaacatcatcatccgtgcggacgggaacaagcttctttacctgaaagacatcgccaaggtggagctgggttcccagacttacaacgtatccagcaaatacaacggcagggattccggcgccatcgccgtgtacgccgctcccggctccaacgccatcaacacggtggacgccctggtcaagctctttgaagaccgctcccgcagcttccccgccggaatggaatacaacctgacgctggacaccacgctggccgtgcgcgcctccattgaggaaattgagcacacgctggtggaagccctcctgctggtggttctggtggtgttcgtcttcctgcaaggctggcgcgccacgctgattccggccatcgccgttccggtttccatcatcgccaccttcgcgctgtttccgctcctgggcttcacgttgaataccatctgcctcatgggcatggtgctggccatcggcctggttgtggatgacgccattgtggtggtggaagccgtggaatcccacatggagcgcggcctcacgccccgccaggcggctttcgccgccatggaggaagtatccggtcccgtcatcgccatcgccctggtgctggcggcggtgttcctgccctccctgctgctgccgggcattacaggcacgctcttccagcagtttgccgtgaccatcgccatttccatgctcatttccgcgttcaacgcgctgacgctctccccggcgctgtccgccattctgctcaaacccaaggacccgaccaagggcggcccgctgaaattcttctaccgcgttttcaaccgcagttatgacgccacggccaacggctacaccaaagtgtgccacttcctgacccgcaagctcatcatctccattccgctgctggctctgatcgcctacgcgattgtccccgtagccaagaaaatccccaacggcttcctgccggacgaagaccagggctacctgttcgcggccctgatcatgccggaagcccgttccctccagctgactacggccgccgcggacaaagtttccgaactcatccgccagaacccgaacgtaaaagacgtgattgccatctccggcttcagcctgctgacgggcgtgcagagcacgaacaacgccttcttcttcgtcatgctcaagccctgggaggaacgccccaatccggaccagagcgcccaggcggtcaccgcccagctgaacgccctgctgaccacgaaagtttccgaaggcatcaccatgtgcttccagcctccggccattgcgggggtaggttccgccaacggcgtcaccttcatgctggaagaccgcgacggcaagggcacggaatacctggcggaacaaacggacatctttgtgaaggaagcgaacaagcttccgatattcgacccgaacaacaacggcggcgtgcgcagcgtgatgtccttcgccgtggaacagaaagatgtgcggctggatgaagaaaaatgcgctacgctgggcgtcagcatcagtgaagccaacagcctgctccaggcctacatgggttccctgttcatcaactacatcaccctttacggccagcagtggcaagtgtacatccaggcgcagggcagtgaccgcaccggaacggacatgctcaaaaacttctatgtgaagaacaacacgggaagctccgtccccctctccaccctcgtgaaaatcacggatatcaaagggccggaattcctgctgcgccagaacctgtacaactcatccaagctcatggtcacgcccgcccagggctactccaactcccaggccatggaggcgctggaaaaaacctttgaagccagcatgccttccgacatgggctacagctatgcggacatgagctaccaggaacaaaaaatccagaacggtatcggcatcgtgcagattttcctgctctcctccgtctttgtcttcctgattctggcggccctgtatgaacggtggtccctgcccctcagcatcttcatgacggtgcccatcgctgccctcggcgcgttcctgggcctgtactggttcggttatgaattgaacctgtacgcgcaaatcggcctggtgatgctcatcggcctggcggccaagaatgccattctgattgtggaattcgccgtcattgaaatggaacgcggcaaaacgctgatggaagcgacgctttccgccgcaagaatccgcctgcgccccatcctgatgacatccttcgctttcattctgggctgcgttccgctggcgctggcctccggttccggcgcttattcccgcaatatcatcggaatcgtggtcattgccgggatgacgatggcgacggtcgtgggcattttcctgattccgtgctccttctacttcatcatgaagctcttccgcgtacgcatcgcccggaagacggtggaaacggaagacccggacgaaatcatcgcccgcaaacacctgttccacgaagcccatgaatcattaaaagggtaaaaccgcccctgcaaccatctaaaaacagactaaacgcatatgcgaacaaacccatacatcacacgcgccatcctgctgggaacggcttttgccgcctcctcctgcatgatgggccccgacttcaaaccggtggacatgcccatgcccgcggcattcaggggagcccctgcagcgacggaatccattgcggaccttccctggtggaaagttttcaaaaacaaggaccttcaggacctcctgacggacacctacaataacaaccgcgatttgaaagctaccatggcgcgcgtggaaaaggcacgccagtacatcaccatcacggaggccccgctcttcccgtgggcggattattccggctccgtcagcaaaggctccaactataccggcggcagcatcgcccagactaccggaaccacattgacgccaggagcgattgatgccggcatttcctgggaactggatatctggggcaaaacgcgccggatgacggaagcggcccgcgcggattatctggcttccgaagaaggccagcgcgcgctcatgctttccctgctccgccaggtggcggactcctacctccagctcctccagctggacgaacagcttgccatcgtgcagaaatccgtggaatcctattccgaaagcctgcgcctgtttgacgaacagcttgaaggccaggtaggcgacaggcttcaggtggcttccgccaaggcggctctggcctcctcccaggcccagattcctgccattcaggtgcaaattgccaatctggaaaatgcagtctccgtcctagccggacgcgctcccggccatatccgccgttccggcagcacccgggacatcgcctataacgtcaaggttcccgccggcattccggcctacatcctttccagaaggcctgacgtccgccagagcgaataccagctgcgcgccgccaatgcggaagtgggcgtggccattgccaattacttcccgaccatctccctgacggcggcgggcggcctcgcctccgcggatctgcgccacgtgcaggggcgccgcggcggctgggggctgggagccaatctgaccggccccctcttccaggcgggcaagctgacggcttccgaaaaggcggccaaggccgaattcctggcggccagaaacgattatgaacaaacggttctcaatgccctggcggaagtttccagcacgcttatccagagggacaagctgcgcagcatcaccgccacccagtccgaggccgtggaagcctaccacacggcggtgaaactctcctttgaacgctaccgcacgggcctttccaattacattgaagtattgtacgcccagcagaacctgtaccccgctcagattcagctttcacagtattattaccagcacgccagcacgctggtttccctgtacacggccctgggcggcggctggaacatgagccacaaggctatcatggacggccctgccaggcagtaaaacgcgccccttaaaacagggaattttcctgactgttttttcatcctccggcaagtacggcttgccggaggatttgttttccggccctggggaaaacgcctccccgtcccgtccggagactgcgggcctccttcacccggccgcaggaaccgcgggccgggaacggaatcccctacggagaggccctttctcctgttcttcctcacatccggaaagtgcaaggtctccagccgcccccctttcttctttcccctcggaaacggaggccatgtcggaatcgattcaatttccgcccactcacggtcaacaggccgcggaacaaattcatcgcgtttttcaggaatgaatgaccgttgctcccgatattccatcatttccaataaggcaaggcatctcctgcttttttatccctgatgttcaacctcctgccgaattcctaatccgtttgcggcatcctgcccttccaacaggagtcaagacaggaaaatcatggcaaaagaaatggtccggaaaagaccagcacccggcaatactaatgaaagttaatgcattacatcaaataacacacttatcatcaatatttttaattgttggcggattaggaatccgataaaaagcggaatccctttatgcaagggcttttctactaattgacatgaagactaaatatcttgccctcctgatcgccgccatgggaagcagcctgtccttcggggcttccatcgacggcctggacgcggcttattcaaaagattccaccgtctatggcggaacctccggcgatgcgttgactgtatcctcccccacgactattggcgtaaacaacaccgcccactggacaatggctttcacgatttccggtctgggaagcacttcagggtcaaatgtaggattgctgtttacctataataccggctcttacaaaaatctggaagggttggggtttcaactttcggagtcaggagatctcaccctgtgcgccggaggttttgcttacaacggaggcactaattcctccccctggaaagcacaaacattttccgattattccaccagcaagccactgaccctgttttacacattcaatgcagggaatgtctctatctccgccatgctgggcaacgacacatccacactgaccacgctgaccacattgagcagcggcgctgccttcagcggccaaaacatgacccagatcaatttttccgccaaagacgcctccggaaacacatggagcgctccgaacggaatcacgggagaatacaccttgaataattttgacctgtacacggccgttttgacagaagaccagatgagggaatatgccctgagcgccgttccggaaccggctacggcctctctcggcctgctggggctgggtatctttctgatgcgccgccgcagggcctgactttttccttaccgcgtccattcctgctccgttcagggatggacgttttcttcactctttttcaaatatccttttcatttttccttgacgctctgatgaaaattcggttccctctccccctcctggctgccctggcggcggcatttcccgcagcaaccgccgccccggcgggcacggaactgggaaacgtcatgtacgtgggggactccatcacccacggggtcaacagcgcatcctaccgctgggccctccataaaatatttacagacaacggtatttcctaccaggcggaaggcgtcaaaaccggcaattattccgggggcgttactgcgggcacctcctacgggggccagatattcaacaatgaacattcctcccaggcaagcgccagggcctgggaaatatccggcaggagcagcggaagcaggtttgacggctccaacatttacaactggctggggctttccggcaccaaggcaaacggaagcgcctattcaggccagacattcaccggggacaatacgccggatacctttttcatgatgatcggcaccaacgatctcctttccgacggaaacaacgccacgctggcggaccgcattgactccgtttctcaaaacctcctgaacgatatggacaccatcgtggaggccatgttccaggccaatgaacatgcgaatgtcatcatccttaccattccctgctggacccggcattccaacggcaattcggacgccacccaccaggccgtgtctgattacaatgatcgtctgaaaacatgggggaatggcaggcagaacgtcacggtcattgacatcaatgccggcatcattgacgtagcatcctccacgccgttctacggcgtaagctccatgttcaacaaccccggcagcgacggcctccatcccaatgcccagggagatctgcttatggccggcaatatcgccagggccatgggctatgcggggcgcaccgccggacaggaaagaaaagccgctggcggcctggccatcaattttcaccagggcggacaatcccccgcatggaactcgaacagccagttggaaaataaagggttttccctcgccaacgtcactgtggacgagaacggcatcagcctggggcaatccgaggaaagctccatttcctattcctgggcggaagggacggagctgcaaaacggctttacctttgattgcaacctggttctgggaaacggcgcagcagacggatgggatactgcctccgatttcagcatcagcctggggaacagctccttttacggcacgctcaatattaatgaggcctacatcaaatggggcgatgccattctgtattccctggacatgtccgccaatgcggaaaacctgcgtatggcatatatctgcggcaatgatatggaaggactgaaaggcggctattacgtctggctgggagacatgctgattggggaagcgctttccgttacctccggctccggctgcaacggcctcaccattcaatacaacggcagcggaaccgctgttctgcacgacctggccctggacggcacgggttcctatgcccctgccacttccggaatgcttaacgcggaaaagtcttttatttcttccggctccttcacccagggtggaacaccggaaggcaatattgagtggaaaacggagggattcaccaaaaccgctgataatctggccggctccggtacctttaatgcccgctcccaggcggattcctccgcagggggaacggggaattccgtaaacgtctccattacctccggaaacgccactcatatttatgcgaacagcggcaactacacgggagacgtctggctgaccatctccaaggagggacaagcctccgcctggtacggagctcacggagcttccggcacgctcaacgggaacaccttcctccgtttcacggatgccgccacaggcggaagcacggtcttcggagccgtgaacgccgccggcgtcaccggaaacgtttatctggaattctctgcggaaaacgcctccttcggcacctttaccagcagtaattcctcctctgtggtcggctcctatgccacggatatccaggggaatgtggacattgtggtcaactccggctccttcaaccatcaaatcatgggcggcatcttcgcaaatgccagaaccggaaccaccaccattggaggaaacacgcatgtttacatcaacggcggctccgtcaccggaaatgttatgggcggcggcctgacaggctccatttccggcggcgccaacgtcaccgtcacaggcggcgttatcagcggttccgtttacggcgcgggccagggcggctccatcctggcaggaagctcggtttgcttgacaggaggcctggttaaaggggacgtctacgccggaggcaaggcgggttccattcagggggacacgtccgtcaccatcaccggaaacacggccacgctttataacgggagctcctggggcagcatctccggcggcggttccggcggaacggtggagggaaactccaccgtacgcatccagaatctttcctcaggaacgacggcctacggctttgacaaatacgccggaaacatcagcggaggaaccaacgtaagcggagacaggagcctggtgctggaccatgtaaccgtggacagcctcctggcttccctgagtgacttcacccatatctccgccgtcaaccagacccgcacctcactggattccctgggcggggcgctcaccgtaaccattgaggcgggaagcagccttatcctgaacggaacctctgacctgaccacgcttattctgggggaacacgcctccctgacgcttcaggggctcaccgcagatgcggtcgtcgtggacatcacgggaacaaccaattacacactctccctgacagagatacctgccagcctggacaatatcaaattcctgaacgacggcgttctgtacgacgcggccatgtccatggatcttcaggccaattccgccatgcttttcgcccaggtgccggaacccggaagcgccgccctggccctggcaggactggccccccttctgtggaggaggcgcagaaaaatgtcccattgaggcccttcgttttcttcaggccctgatggacaaaagaagcccccgccggcgcaacgccggcgggggcttcccatgcggaaaaacggcggagaagaaaaggaaaagcatccacccctccccaggcgtttttcatggaacagggggatcaggcccttctgtttttaaacagttccagtgcaagctgggaccaggtctccagtttctcaaacatttccccggacaattcctccggagaaacaaaacggagattggccagggccgcttcattcgcgcgcacacggtccgtatccagctcaaacaggtggacaatgcccagatgcacggcccccacgtcattggtatcgtcattaatcacgccgagaacccgctgggtgcagttcccgtcaataaccagttcctcgcggatttcgcgctccactccggccagataggtggaaacgtcgtcatggccgaattggcggtccaccggattgatatggcctccgatgccgatggagcccttgtcatgcaggcgggcctcgccgccggagcctccgcgcgtgtaatgcagaatgcggccctggtggcagaaaatggcataggcgatgatctgtttgtgggaagggtcattttccgcagcctcccggtccatgaacgaggcgacgcccggcttcatgaacgcattcagataatgatccccgccttcccggtgtccctggaaatagcccgcttcctcaaaggcagcgcggggaaccaccagaacctgttctccatggtaacgtgacatggaaacaccctacccgttttcatcccgcgctcaacaaaaaaggcgctgaaacggcaaatttgccccttccttcaggaaggcgcgggctgcccctccgcatcaggagacatccctcacttccacgccatgattccggaacctgcgcatgatgctttccagctgttccgcatccatgagatggagcggcagccacagcaccagcttcttgccgaacaggaacagcagcgcgtggcgcgtcctgcacaacgtggaaaaacggtcgtagggaatattcatggggtcaacgcccttgctggagaacgtcaggtaatcctcatgaaaaacgtaatccttttcctgatggtacatgggcacctttttattggcggccagagcggcctttgccagaaaggggacgtaaaaccaggacaggataatcgccatcagcgccccggccagggacagccaggcgaataagggcagtgggcgcagggaaaaggaatacagcgccatcaatacaaaaaaggccgtaatggccaggtccagcggctttttccacctggggcgcaccgcatggtaccatgccaccagcacctgggttgccaggcggtcggaaggtacgggcttgacgagtttgatgacttctgaatcctgcatcatggcggcagggtatcttcattcccgctgaagaaaaagcctaaaagcaggctcttccgccgccattgtgtcaaaaaagcccctccggaaaggtctcttcccccctttttcccgcctcccattcacgggggaaagcctccttcccccgtatgcaggccagaatttccttgataatcatgcctcccttcatagaatgaaaaaccaaaagccttcagaagacccggtggcagacaatcttcaaattcacgtacgcacgttccagccctcaaccactcaggcacaggctctggaaaccctgacggattccatggcggaagtccttgacgaccgacagctaagacacatcaagaatgcggttcttctgcgtgaggaaacgcagaccacctatctggatcacggcctggccgtcccccacggacgcaccagcgcgctggattccatgcaggtcaccgtaggcatcagcccagagggcgtcctctggccggacgattcccgcaacgctcatctcattgtgatgctgggcgtgcccgccgccatggtgaccggctacctgaccaccatgcaaaaattgctgcggtggcataaaaacgcccccctgggccccaacggggaatggacgggagatgaagccagcctcctggcgtcccttcaacaagccctgcaatgacggacaagaaaaaccagcctgcggaaaagacgcgcctttcctggtcatggctgcgcatggcgttgagcctgcgtgaaaaaatcaagctgggggacaagcaggtcatcttcatctgggcggtcgtcgtcggagcgctgggtgccctgatggcccttgtctttgaaatgggcgtggaactggtgcaggacgtcctgacggggcggaccagctacaggcaaattcaggtttttcaggaaatggccagccaggacccggcctggtgcatcttcgttccggcggcgggcggccttttggcggggcttacgcttcttttcacccaccgctttgtgccggccaaggcgacggaatacatggaagccgtggcgctgggcaatggatacgtgcctcccaagcccagccttctgcgttccctgtccgccgttttctccgtaggttccggcgcatccatcggccgtgaaggcccgctggtgcaggccgccgccgtagcgggttccgccctggggcgtttcttccacctctcagctcctcgcctgcgcctggtagtggcctgcgccgctgcctccggcatgtcctccgccttccatacgcccctggcgggcggtctgttcgtaagtgaaatcgtcctgggcgcgctgactattgatttcctggctcccctgctggttgccagctgcgcggggtactttaccatgggcctgttccatgaacccgcccccatttaccagctccagcaggaagtttctctggcgggcaaccagcatgtgctctggtgcgtgctgctgggggcccttgcctccctggtcgccagtttctggctcctcatcctcaaaaaatcgcgccggtacctgaacggcaagcgccaatggctacccgtgcgcctgacggcggcaggcgtgctggtgggagccatcgccatcttttacccggaaatcgtagggaacggcaaaaatatcatcacctccctcattcattatgaatttgacgccgcgagagccgccgtcctgctgttcctgaaaatattcaccgtcgccatcgtcttcggcgtgggaaccgtggggggcgccctgacccccagcctgactatcgggagcgtctgcggcttcctgttcagcgcggctctcacccagctgggggtgcccggggaccatgccatcgcctattccctggtgggcatggccgcctttttcactacagccgcgaacgccccgatcacctccctggtgctggtggtggaattcaccatggccgggcaaatgatgttccccctgatcatcggcgtgctggtctcctatggaatggccaggctcaccaaagcccagtccatgtaccatgattccctggccttcggccccagaagcacctttgacaaacccctggcccaggtacagcttcaggatgtagcgcgcaaggatccgcccgtggtgcatcccctggacaaattcggcaccattgccgccatgctcattaaaaacccggcccagcccatcttcgtcacttccccggccggcaaatacctgggaagcgtggtggcggaagacgtggcggcctttgcccgcaacaaggagctggcccaggccgtactggccatggatgtgctgcgcagcgacatgcctacgcttcccgcggacatgcacctcccggaagccctgggtattttctcccgcccccactgcgcggaatccctggcccttgtaaacccgaacaacgatctgctgctgggcgtagtcaacaagacggacctctacctggtgctctctgaaatcatgcgcagggaaaaactgcaataaaatctgccttgccgcgctgtatccgttgaaataccggaaaaaacgccgctcccttccgcggtttgcgggaaatgcccgttcaaggccgaacacccttcccgcccatgatcgaaagcgtgttataatatgatcaaaccgcattccgttatccgcagcggccaatccggaaaaatccccttcttccatcttcttgaccgtgactgcctcctgcaagaagacaatatgttccttcaaattcataggctcctgcgcggtataggacgttccgccacccgtagaagccttggttggttatctctttacgttcttcaaggataaccagcatttcccgcaggtccggcaagtcatagctttccacgtaagcttgcacaatgggattcataccttttaggtgctttttcaaaattcaccttcatctgcctcccgccccaaaagtcattgacttccttccccacatatctttccatatattcccatgacggaagagaataaagaattcgttgatgcttacatcttcatgacctatgaaaacatgcttaaggttttcgaaaataactgtcttaaaataatttttcctgaagaatgcaacgatccatttgaattcttatttcagaactccccttgttattccaataaaatagacggcttacgttattcttatggatttctaagttttacaggaaaatacacttcgccacccatgtggggacattatgctgataagcataaaggctgctgcgtacattttagatttccctccttacccgaacaagaaacggaggataaattagaaaaaaatcataaatataaatacagaaaattattattcgaaccgaaaggagactgccttactatagatttattaagatcacataacaaagagtctaaagaaacaaaaaatactatattatggaatgtcatctattccacagaaagggtaaaatacaatgttttaatgtacaattcattcaaagataacgaaaaaagattatctcgcataataaataaagcatttcttgtaaaagacatatcatggcaatatgaagatgaaaagagaatcatcataccaactacaaaaccacaaaaagtaaaaaacaatatggtattcacggaagatttcaataaatatatatccagcgtcattttagggatgaaatgccccgcttcggtcggcctaacattatctctaataaattatcacaataaaggggaaaaaattattcgtgtccataaagccgaacctacagacactacatttgaaattatttcccacgagcacgaagcttttttaaaagagcttaagaacagtggagaatagcactctttccctctccccagttaaacaccatctgtagcaagccggggtacctgattcggaatcttttgaaaaatatcccacaaaaaaccgcactaaaaatcaaacttcatttacacatcatccgtaacagacttgttccacttgttcctgcgcatcctgaaaatccgccttcggcctctccagcacgtcatttattcatctattctgcttccttcaaagggtaaatttcccattcttcgtgtctgcagcgtccagccttcctttcacgccctaatccgggcatgacctccggggaacgacgcatccggggctccgttcatgagaaaacacggggcaaagacatgcattccccggcaaattgccctgccgccgtcccggaacatgaatccggcttcttccgcaatcctctgcccggaagtcctccggaaaaatttgctccttccaggaaacgcggacaagcctggaaatgcatttttttcaccctcttttttcataagaggggtcaggttaaaaataacaacaaacttgcatttcagaccttttccggtacgctttcggcatgagccgcaccctgagaatagaataccccggagcagtctatcacgtgcagagcgagggcaaccgcggagatgccatttacctggatgacgaagacagggaaacttttttgcgaacgtttcaggaggcagcccgcagaagcggctggaccgtgtacgcctacgccctgatggccaatcactaccacattcttttccaaaccgcgcgcgccaatctggtagatggcatgaaatggctccagactgcctatacccagcgttttaacgcacgccaccgaatgcggggtcatctgtttgcgggcagataccactccatggtggtggaagcggataacgcccactatttttcaaccatcattgactacatccacctgaatccggcccggtccggcctggcgcgacgccacacgttcctttccggctgcaaatggacgagcctgcccgcatggctggcctctcccgccaaaaggcccaaatggattcatccggaacgcggcctcgtctgcttcggctgcgacgacacggaagacggccgccaaaaatacctcaaccatctgatgggccgttttgaagcggaacgcatggatgaacgctccctgctgcccgccgaccacgttggccccggcaccgtccagcggggctggtgctacggctccagcgccttccgcgccaagctggtgggggaacttccccgtctggcgcgcagaaagcccgtcacgacgggcatgcgagcgtcggaaattggggagtaccaagcggaaattatcgtaaaaaacggtctgaaggcctttggcctctcggaggaggagctgcttgtcacgccttacagccacccgtccaagctcatcatcgccctggccgtccggcaaagtacgctggtaccgtatgcatggatcagcaaccggctgcacatgggtattcccaaatccatgggaaccttgctccaccgggcaaaaaaaatggcggaaacggatttgaaaacgagggcgtggatcgagcgcctgagctcctgacctccgttcctcccacggaataatttgaaaaaaatttcctccctccacaaggatgcgccgggcatgaaaccgtcctcccgcggcaggaagcactcaaggtcagccccttctccggcgcatcatcatgcaggccagcccaagcaatcctacggatgccgcagtcggttccggaactactgaaaaagccatggcggcaattccggccttctgccaccaatgcggaaatcaagatggctcccacccatcgttgtttgtaacattccagctctgccgccttgtctgttcctgataattttttcctttgtcatccattcttcatggacaccggattcaaaatccaccttatggaaacaggaacccgaataaccgcatacaaactccatgtcccggcatccggaacacgcagttctggcaggcgtcaatcagcaagaacggggtcagtttacaaatcacaacatataaacatattttctattttcttactgacccctgaaggccgccagggaaaaaaatgattgccagtccgcttcgcggaatgataaacggaaggcgcgtgcgaaaaactgcgcgtaaagcgtcaacccaaatacaacaacagaaaagatggcacagacatattcccagcgcgtgctcgacttggttaaggccaagcatagccacgaaaaagaattcatccaggccgttcaggaagtgctcagcacgatcgaaccggttttggccgcgaattccaagtatgaagaccacgcgattctggaacggatcgtggaaccggaaagaaccatcctgttccgcgtgccgtggatcgatgaccagggcaaggttcaggtgaaccgcgggtaccgtgtggaattcaacagcgccatcggaccgtacaagggcggcctccgcttccatcccagcgtcaacctcggcatcctgaagttcctgggttttgaacaggttttcaaaaactccctcaccaccctccccatgggcggcggcaagggcggttccgacttcgaccccaagggcaagagcgataatgaagtgatgcgcttctgccagagcttcatgacggagcttcagcgccacatcggcgcagatacggacgttcccgcgggggatatcggcgtgggcggccgtgaaatcggctacctgttcggacaatacaagagaatccgcaacgaattcaccggcgttctcaccggcaagagcctgaactggggcggctccctcatccgcccggaagccaccggctacggttgcgtatacttcgcccagaacatgctcgccacccgcaacgacgacttgcagggcaaagtctgcctggtgtccggttccggcaatgtggcccagtacaccgtggaaaaacttaacgaactgggcgcgaaagcggtcacgatgtccgactccaacggctatatttacgatccggacggcatttccccggaaaagctggcctgggtcatggaactcaagaacaagcgccgcggacgcattgcagaatacgtgaagcagttcccgaaagcccagtactttgaaggccagcgtccctggagcgttccgtgcgactgcgccttcccctccgccacgcagaatgaaatcaacggggaagatgcccgcaccctcatcaagaacggctgcaccctggtggcggaaggcgccaacatgcctacggatctggaaggcattgaaacctacctggccgccaaaatcctgtacggcccggccaaggccgccaatgccggcggtgtggccacctccggcctggaaatgtcccagaacagccagcgcctctcctggacgcgtgaagaagtggaccacaagctgaagaccatcatggccaacatccacgcaaacgccgtggcccacgcccatgaatactcctccgacaaatccttcaccaactacgtcaccggcgccaacatcgccggcttcgtgaaagtggcggattccatgatcgaccagggggtagtctgaccccggccgacatacttgctgccaatgtaaaacacaccagaagcgccgggttcgcccggcgcttctcttttctgcggaaacgtctccataccggaagttcctttttcctgtatgagccagacatgacagcggaaggacttcaaaagcctcccggcattggggacaaccaccctcaggactttttcccggcggcagggactttatctgctgcaccacggcagtctccgggtattcattctccgagttggactgggcggtcaaaaacgagccagatgacctgtctccggaatttgaagggccattctcttccccttccccattttcccgcatcaagagccggaaaaacgcttccccggctccgatgcttaaaaggtactgttattcatttaacaggcggcagacggcctgggccgcatgttccgccgcccctccctgccccaacttgtcggaggcctgtttcatttcctccagcagggcatccctgttttccgggacaagcaggcgttctatttcatcaatcaccttgtccggtgtaaaatcaaactgaaccagctccttcaccacggggttctgcgccaggatattcaccatgccgatgaagcgtatcttgatgagcatgcgggccatccagtacgtcagcaggggaaccttgtacaccagcatgtacggcagacggtgcaaggcggcctccatcgtggcggtgccggaagccacaactcccacggcggcgcggtccatcagctcatgatattttcccaccgcaatgtggaacagttccggaggcatgccggctttccgcaccatgccgcgcattctttccgccagagcctccgtggaagcggcggtttcaaaagacagttccggccgttcccgggaaaggcggttcactacctctataaataccgggaaatgcctgtcaatttcacggttccggctgccgggaaaaagaccgaccagtgacggatcccggacgccctccttacggatggaagcaatttcatctaccaggggatgccccacaaactccgttctcagtccggcttcctggaacaagggagcctcaaaagggaagatgcacatcatcaaatccagcatgcgcaccatcttgggaatgcgcccgcgatgccatgcccacacctgcggggagataaaataaacgattttggtgcgggggcagcacttgcggaccctctccgccagccgcagattgaaccccggataatcaatcaaaacaaggcaatccggctggtcctgccgtatcctttccagaatggagagaaaacgccttctgaaccatccgtattttttgagcacctccaccacgccgataacggcggcttcatccgcccagtcttccacgccgggacataacgcgtgcatgccctggccgcccagccctgcgacctccatgccgggcatcaggcgcagcagattcttcaacagcagggcgccatgaatgtccccgctcttttcgcctgctataatataaagcttcatctctatctgcatcggcgcacgccggacgcttccctaccttaccagccccgttcccgggacgcaataaaagactttcctttcaaggattttaatgcaagatacgcgccgttatgcatgagttgatctcactttggatgtcctgggtgcaggactggggatatgcgggtgtcattgtcctgatggccatggaaagctccatctttcccgttcccagcgaagtggtcatcccgcccgcggccatcctgtccgcccaggaaggagcatccatgagcttctggggagtggtggctgccggaacgttcggctcctggctgggttctgccattacctacgccgtggcccgaatcgtgggccgcccggtcatcatgcgctggggcaaattctttttcatgccgccccacaaggtggaaaaggcggaaatcttccttcagcggtacgaagtttccggtgtcttcttcgcccgccttctgcccgtcatccgccacctcatttccattcccgccggcattgtccgcatgggattcggcattttctccctggtcaccgtgctcggctcgtttgcctggtgcacggtgctcgcctggtacgggcaccgcatcggggaacggcatccggaattgctcaaatctccggaggagctgatccgcaccgtcaaaagcgaaagtctcccccttattctggccgtgctggttctggccgtctgttacatactcatgcttcgtctgacggaccgcaacaagccggaaaaagccgcagcggacacgtccgcagaaaaagagcagtaaccccccctttttcccatgatcccttccaaggaagaccgggcagcccgggcgctggagtatttccaccaaggatataattgttcccaatccgtttttgctgcttttgcagatgtctgcggcctgacggaagaaacggccctgaaactgtcctctcccctgggggcaggcattggacgcatgcgggaggtatgcggcgctttttgcggaatgagcatgctggcgggaagcctgtatggaaacagttccccggaaactggagaaaaggaaaaaatcttttccctggttcaatctctggccgcctccttcaaacaggaattcggcactctttactgccgggaactgctggggctgtctccggagcgcctggcagcggaaacggcgcgccccggagaaaggactgccgcctattacgcctcccgaccctgtgaacgctgcattgccttctgcgcccgctgcgcggccgagctggaagcaaaagcccggcgtcatgaaaatacccgaccccctttgcaggggaaccgggcgctttaaccatacgcaaggcgccgtcaatgagaggcggaactgctgcatgcgccgtccgggcaggacgccttcagcttgtctatcttttcattcgtttcccccatcccctcgtcataaaagccctgctcgtccggggccagcacctggaggaggcggagaaattcgcccgcgtgttccttttcctcattggaaatatccagcagaacttcctgggccagcttatggtctatggattctgcaagctgggtataaagctggatagcttcatattccgctgcaatcataaaccggatggctctcaccaattcgtcatgggtgagtttccggttttcctttaatccgctaaatgcatttgtaaattcaggcatgcagatatgacccagactgtaatgaatacattcaaaatgttcctgtcatatattttcagcgacattctttgaacttttattcataaccaatggtctaagaaggccagtatcatcccgaatacggatgaaacacggggtttcacttatactgctcgcttttacaatacattcccgccactggcacgtaataaggaaaagagataccgcaagaccggaacagaaaaacgcccggcttcacctgaagaaaaccggacgttttacagcaaaggatgaaaagcaccgtcaatgggcggcggaactgctgcatgcgccgtccgggcaggacgccttcaacttgtctatcttttcattcgtttcccccatcccctcatcataaaagccctgctcgtcaggggccagcacctggaggagacggagaaattcgcccgcgtgttccttttcctcattggaaatatcccaaagcacctcttgagccagcttgtcatcaatggaggcggcaagctgggtataaagctggatggattcatattccgctgcgatcatgaaccggatggctctcaccaattcgtcatgggtgagtttccgatcctcctttaggccgctaaatgcattcgtaaattcaggcatgcagatgggacctgatacgtaacccattcattcaatatgctttgtcataacttttatacgatggtggccttaaagcagtccagcgaacaaatttccagcctctcttgccggcacaaaaaaagagcgccggattttcttccgccgctcctgttaatcaagctcctctccggaacacctgacttacttgccttccgcaggcttgggtgcgtatttcttgaaaaattcaacgtactgggcgggagtacggccgggaacataacccgtgcggcccagctccttgccctccgcatccaccaccaccatggccggcacgccggtaatgttatacgtcttggcttccttggacttgctgaaatccgaactgccgaactcaaatttgacgccaatggccacgccgtccatgccttgtttgaagtcctttttggaaaggatttctttctccagcttaacacaaaagccgcaccaggacgttcccgtgaaaagaagaacaatgggaaggccggtttccgccgcctgcttttgagcgcttttcaggctcttgccccagcggaatttcactttcgccgccttggcagccttggctgcggcttccttatccgtgggaacgctttgagccatggaaatgccggaaacgctgaaccccagcacagtacacaatgcaaaaataaaatgtctgttcatcatactctgtgaaacgttcctctcagactagcagaaatactttgtataggaagagaaatcagtgtctttttcctcgaaggaactcttccgtcccccgtccccaaaatgaggcgttctcaaaaaaagtattgctctttcctccttaatcaggtaataatccgcccgcacttacaaatgcgcggttagctcagtggtagagcaacaccttgacatggtggaggtcgtaggttcaaatcctataccgcgtaccatttttcttaaaaccccgttcctttccggacggggtttttcattgcctccctccagtcaatagacatagcatcagccttcccccgtaacaggctcaattgaaaaatgccggcataaagagacggttaatgcagaagtttgcgctgataagaaaaaataccggatatctccctctttactcacttacagtgaaagatatgatgagcatttaacctcattagtctcccatacagggaaaaatgtttttccaactttttttgaacacaagccccttcccgggacgctaatggtaggagggcagcttaaggccccagcccttaccccctccttccctgatgaaacaatgactattaaaagcccggcggaaagcattccgccgggcttgctttttataagactccgccggttaaaacgtccgggaaattaacgggtagtcaaacgatcatataactcattggcatatttatgattgggatggttcacattcatatacgcctcataaagaggatgggatggatccgattccatccgcatggcttcctctgcgggagaagacgccgcatttcctgtatgatggagaggagcctcatcaagcagacgtgatgcctggtacaacaggcggattgcatccggattggaaccgagtcccggattatccagtaaagcgtccgcatccacccctgtttcagaggcaagccgccgaagaacggcggcagccctgcccatgttgcgttcataattggcgccccattcctgctgaagggattgttccgcctgcatttccatctccatccgggcatcttccatgtgctcacgggcctcgtcatatgcctgggccattgtctcctgaagagcattcattgcctccggcggtactccgtaacgataggccgtgcgggccatacgctctgccagcccggcattccattcgctttccggcgtggattcaggacgttccagacggtattcttcctccgactccggcaatccggccagccggcggaaccgcgccatctgttcttcattctccacaccgggataacgtcgcaggcgttccagctccgcgtaactcttcgccagagcctccggcgtcttaaacttggaaagagatttctccatccctttcaactcatcaaaccgggcgtaccaatccggagcaaaacctccgtcctcacccagaaggggaggaaaaggttcagtttgaactgcggtttcggacagcgcgtccgtctccggggaaacggccccggaaccctccgcatccctgaaaggagcggccatgctgttatcaatggaatcaatcatttttctcttcttctgtggtttctttaatggctaattgaagctggcggcggatgtacagaaagatctccctgtaggcatccctcctcatggcgtccagagggtcgtaattccccggacttccttgaaaaacgggcaaatcagtctggaaacgggcttccagaaaggaaagagtctcacgcccgtccggggtgtcaaacacccggagaagctggcgccttttgaaacgggcctcccgaacggaggcctcctgctgcaatgtcgtatcctggttcatttctgaatcgcggttaactggtcaagcaagggattgagggaagcataaggatcctcttccgccggagccagggaggctccctgctggaggtccgcccgttccttccgcatggcacggacatcggcccagggcctcagcatgctctccggggcgccgtccacacgggcggacaggcggaaacagtggtcccagtccacatgatccgccaaatccggggcagcctgcatcatcatattcagccgctgaaggctgcggtccatcccttcactctgcaagcgcctgagcaccagggcaatctttgactgatagacaaccctgggttctccgacggcaacggagccgtccctccctaccctcaataccgcacggggtggcctgggaaacttgcccatccggaacagcagggaaaaaatgcgtgtcattgtggaatacagatcactcacaaacagcgtgaaggaaggagaaaacatcaagacgcgctcattctcccgcgccatgacctccgtggcagtcatattgccgcggtgcccgctccaaagctccagcatgggcagataataggcacggcgtatcgcatcctgcttctgtgccagacggtccatcccaacatcatacctgccctgcgtagcccattcccggggaaggtgaagggaagcggcctccggggtaatgacggtcctgccgccggcccgcaaatccacctccccaatctggttggcgagctccagaatacggggaaaggcggccacctcgccaagagtgtccagaatacggttcaggaactgcacctgctggatggcgggaaacaccagcctgccgggagccagaccgtacgggccgctgccccacttcaaaaagcgggttaccagataagggaactccatgtatcccccttcctccacaatcacctggtcgtccagagacaggtaaacgctttcaaacggcatgtgggaggcctgctccctgcggcggctgcgccgggtgcgcgggcgcaccacatgcagaaacctcagagttgtggcatacggattgcctccgcgctccagaacttcccgagccttgggccccagagctttcaccccgaacatggagcgtgcctgatgagccgtgtaggtaaactccctgacgtaggtatccacccggccttccgcattctccgcacaggcgaactgtccgcacggaatattggtaaacaacagccttccgtccgaggatgtgcccgtaaacagacttccggtccccaaagccacccggtccagaaaacactcatgaatctccgtataaaaattggaaacggacaattctttcagggcaatttccgaacactggttataccaggcctccgcctcgtcgcctccccggtcatccggagccgaccacttgaaccatacgtcatggctgggcgtaatataggacatatggccgctggccagcttctggcatgcctccacagccgtagtatccgtcatgcggtccatagcgtccctgttgggtagggaaacctccccttcccgattcaggcggcgaggcagcacgtaatccctcagacggtcccaccacgtttcccatggcgcgcgctgggcggccaaggacttgtacacggaattcaattccgcaactctttcttccatggcaacgcctatcccagagttttcctaagcagagtccgcggattaacctccccctgcccggcggaagaatgacggcgcgccagaatggtggaaatcattccctgcctctgccgttcccgggcctgataatcttcccctacttcttgttccacgctctccgccttgaccgggatggtctgctctggagcagaagcggaaggtgtggacggtttcataaatcccataatttcttttgctttctattcatggttgatactgattccccttcccttctgccggatataaggctccagaggatgccggacgcccgcctcacagacaatccatgcggcgggggcgtccttttcccatggaaggaaagggaactctccccacctgcccgaacaatccgggcaagtgcttgcatttatcaaataaacaaatcggcaaaaaatgcacctgaggaaaaaccggacgcatacatgccattggtggcatcaaagaggtcgcctccaaacgtgatgcattccgcatccgtttcctccaaaacatagggcgctatgatcaatgaatccttacttcagccggatacgccatccgcgctggacatctgcaacgcggccctctccaaaataggggaggcacctttggacacgctgattgccaatgaatccacggcatcccgcctttgcgttcttcattaccatccggcccgcagggaaaccctttgcatggcgcgctggaccttcgccgctacgcaaaccactctggactccgtttccgcacaggcgcccaattccctgaccccctatcaattcacgctgcccgcagactgcctgcgcgtgctggatgtggaatgctcggaatggaaaatgcagggacgccgcattcatgcttcctgcgccccgctgcccctaagctacattgccgatattgaaaacgccgaccaattcgatcccctcttcatggacgcactggccacccggctggcagaaaaactggccatgcccctgacgggcaaccaaagcctgcgccagaatcttaaccaggaattccataaaatcattcttccgcaggcggctaccgtcaatgcggtgcagtgcttttccaatgattcccacccgctgctggatttgctgagaaaaatcaaatcgccctcttacccggaagaatgtgaataacatgagaataataagaaaataacataataataagttgtgactacatgctcatgaaagcactggatttcatacagatatttgcctccaacgtccgcaggctggacttccgcctcagcagtgcccaggtcatcctggccgtcattgccgggtacaggcgccacagcaccattacggaagccacacgcctgcaccctaataccgtcaccaatatcctgcaggatctcattgcgcagggatatgtcaaccgtattggagacggtcgcccttatgtttaccggcccactgcggatggagaacagcttgccggaaacctgctggacaaaaatacattccccggcatatgaaaaatcccctgctcagtacggaagaaaaacgccgctggttggcccgcgttttccgggacgaggacggagaatactctcaggcggacaaattcaaggcactggtggaagacaccaaactggcagcccttcagcaggaagaggaggaattcaaacgccagcgggaaatgggcgccgaaccgcaggaccccatcctggctctgctccagtccctccccccggcagaactcaatctcaataatcacccctcttcctgacaacttaacaagatgatggaacaaaaaagctctctagaccaaacaagcttggagagctttttcttttccaagtaagttacgtactccctggagagtacggcgggaggcatcttctcgaagcttgccctcgtcatgtttcaatccacgcactccttgcggagtgcgaccggcgactaattggggcaggcatgagttgaggctgtttcaatccacgcactccttgcggagtgcgaccattggctggctagtgaaatttttccgctcaatttgtttcaatccacgcactccttgcggagtgcgactaggagctacggaatccacggctccaatataaccggtttcaatccacgcactccttgcggagtgcgactcttccggtgattcatggcaggtgaaaactacgggtttcaatccacgcactccttgcggagtgcgaccggactttccaatcttctacggtggcgggcgagccgtttcaatccacgcactccttgcggagtgcgacaggatggttctccgaatacagcccacacgaccaagtttcaatccacgcactccttgcggagtgcgactgaagtatttgataaactgaaatccgtagccttagtttcaatccacgcactccttgcggagtgcgacttgacgccatgccaaaaggcgcgcatcggctattggtttcaatccacgcactccttgcggagtgcgacaggaagttttcagggttcccggccctcgcgggagggtttcaatccacgcactccttgcggagtgcgaccgatgccgcctccgcccaaaacacccccatcgaagtttcaatccacgcactccttgcggagtgcgacctgcggggaaatgatgcccctggagttttcccggtttcaatccacgcactccttgcggagtgcgacccctgctcatccacgcatatggtgcggcgatacagtttcaatccacgcactccttgcggagtgcgactttggggcggcaacagcatccggcgtgctatccagtttcaatccacgcactccttgcggagtgcgaccatcggcaataatgggaagcggaggctccaggccgtttcaatccacgcactccttgcggagtgcgactggtgccgtgataagcacgttcggcagtttgttgtggtttcaatccacgcactccttgcggagtgcgacgcggatgagaaaaaaataataaaaagctattgacgtttcaatccacgcactccttgcggagtgcgactgtttaagtctttttttgaatcaaaaaacaaaaatgtttcaatccacgcactccttgcggagtgcgacctatccacacacacgttgctttacgtccaataaagtttcaatccacgcactccttgcggagtgcgaccgaatacatcgttccaacattgacttctatcaaagtttcaatccacgcactccttgcggagtgcgactgatgttgaagaggccatccatatcggcgaaacgtttcaatccacgcactccttgcggagtgcgacgataacctgccaaccgaacaaggaggtcaacggaagtttcaatccacgcactccttgcggagtgcgacgaccgcctgaccaaacaggtgaccactttatccagtttcaatccacgcactccttgcggagtgcgacgaaagtccaatgcttcctcgcggttgccatcggggtttcaatccacgcactccttgcggagtgcgacggacatggacttggtatcagggtccagctccatgggtttcaatccacgcactccttgcggagtgcgaccaaatgccgtggaagtgctacaccgtcccacagggtttcaatccacgcactccttgcggagtgcgactaaaaacctgaaagacaagattatgaataacaaagtttcaatccacgcactccttgcggagtgcgacggaagaagaagcctgcctggttgaactggggctgaaagtttcaatccacgcactccttgcggagtgcgaccgtcacgccctgggcattgctttccagcgtggcgttgtttcaatccacgcactccttgcggagtgcgaccagtgtctggatctgaccagtggtcagctataaagtttcaatccacgcactccttgcggagtgcgacgtggcgggccctggcccgagccatcgaagaaaaggtttcaatccacgcactccttgcggagtgcgaccgtcagattgatgcggcggtgaatttgcataatatgtttcaatccacgcactccttgcggagtgcgacaggtcatcgccatcacggaaaaggacgagggcatggtttcaatccacgcactccttgcggagtgcgaccgtaaagcctcctgtccatttccggcttgtgaatgtttcaatccacgcactccttgcggagtgcgacgtggaatgttccgacgtctggatttcccggttgagtttcaatccacgcactccttgcggagtgcgacgattccagcaatggcatgacggccgctacacacagtttcaatccacgcactccttgcggagtgcgactgcgcccgaccttatacattgctactcaacagagcaaatcatactttgcgccaacctccctaaaaagaccgtcattgcacggttgctctttctgagtatttatctgtcaatcttctattcccaatgcattacaccaatcgccgacctgccggggaattcgtgtgagcttgaggttggcgcacaggccatgttcaacagtctttaaataatcaagggaccggagatgtcatagcttttctccttacccaattgttctattttatgatgccaattggaccccatatgataaattctgaggctgtcactctcgctatcaataatcttaagcagcttgttcctaatgtcaaccaattgagcaggaggcaattcacattcaaatacggaattctgcactctctgtccgacattttcacaggctcgggcaacttgccgcaaccgccgctgcccggccttgtcatccgtagctacatcatacgtaatgagaatatacatgacaacagctcgttttacttgccgatgaacggagggtagcaatccagatccccacgcaaatggcgtgccaacaaaagggcctgaatatgaatcagcaatcccagggtggttttttcctgaagaaaaggatgcaccagaacggtctttttccgttcctgccaggcatttaatacttttttacgggaatcttccttcaaaaaaacggctccggattcttccttgtcaaaatcatctgaggatatctgcttgcggttaatcagggtaagggccaggcgatcggcaagaggagcccggaattcctccatcaggtccaaagccattccggaacgccccgggcggtcacggtgcagaaagcctgcggcggcatcaatgccggaactttcaagggcggacctggcgtcatggcacaacaaactgtatagaaaagataaaagagcattaaaacaatctttgggagggcgtctattgcggctttcaaacaccagctccggatcttctgtcctctggcaatgggacaagcaggaaaaataggtttccgctgcggaaccttcaatgccccgcaacatgtctccggaattgcatccacgggccatgcggcaaaaagccgccagacgatcgatcgcctccgacaaatctttcccgtatgttctttgcgcccttaaaagcagactgcggcaattcgcaattttggctcctatcatttcccgggcaacgccaacccatcttgcctcatcatcagcccagcggtattgctcccggcgcaacaggatatttcccttcatgaagccctgtacgccagccagaaatttaccgtaaggattgcaaaaggaaagcgtgatgccgcgttccgcacaggctcccatcaaataaggggaaactcctatgtcccatcccagcgtcacaataccctccaagttatggaggggaacccgcagcagacacgttccttccgcattgacttttacagtatcgccatccttggacagccagcatccttccagcgtcacaaacaatgtatttaaatgcttcttcataaatcatcggcttcacttgtttccaggctgccttcaaacacactatccacccgggctttcatggtctgcctgtgctcccggcaaacgtcaggaagacagtcattgaccagggaacaggatttgcaggctttggaatacatgggcggcggcgtcacttccccggttaaaacctccctgacattcctgatagcctcggctgtcagaatacgcagctcttcatcaaataccacctccatccttttctgggtctttccataaaacagaaaaccggagggaatctccaacccaaacatttcttccaggcacaaggcctgggcgcacacctgcacttcatccgcacggtgcggtttgggcttgccaaccttgtactccacgggcgtcatggatacgggaatgccgcctttctcagcataaacaacctccacgacatccgcaatgccgtgaattccccattggagggaagaaatatgaagagaacgcaggatcctctttcgcccgcggttttccgtcatgccggaatccgcccgttcatgaaatacattcccctccgccgtaaattgattatcagcccacgcgcattccagatgaatcagtgcgcattgcctgggacaatacaagtaatgctgtaatgccgccaggggcactgaaaaaaaggaagaagacatcttggaaattttgttcagggtgaaacactaaataaaatactaaattaatcaattcatatattgcaaatgatcatatggaacctatgatagtttcacatgtatcaggctcgcccccatcagtctctttccactcacgaacaagaatgtgcccgtacgatgtccaccctgcttgctcccttagggctatcgcaatttggagccttgatcggcggcatgcacgacttcggcaaaatgagtgcagactttcagcaatacatggatgctctctctcaacatatcagtcctccaattccacaaggcggcatagaccattccactgctggagcccagtttgtctggaattattttcccatcccggagaactctgaagaattttttatcttccggcaaatcattgctttatgtattgcctcccatcacaaccctgctctcattgactgcttccgtggcacgatgcccggagatgacgtattctccaagcgcatgaaaaaatccggagaaaaaacccatcttgatgaaatcctgtccaaattgacgtttcaggagaaagagcattactactctctcctgaaaaaaacggaactggccacggaattcaagaatgtttacaccctccttaccacactgtttggccactgtccaaaaaaacaagcattccatgccggactaatcgcacggttctgcttgagcagccttatcgaagcggattacactagtgcttctggaaaaggaagctacgaaagcattccggaaccggattgggaaggaatgttaaaaaacttgaataaacatctcgaacaattcaaggctgatactcccatcaatcaaagccgggcagccatgtcgcaggagtgccttcaagctgcgccaggacgagttggcaagtggaaccttacacttcccaccggtgcaggcaaaaccctctcaagccttagatttgccctggaacatgcacggcggcaccatttgtcacgcatcatttacatcattccctatacctccattcttgaccaaacggccaatgccatccggaaagtacttggaaatgaatataaagactgcatcctggagcatcattccaatctggtgaaggaaacccttaacaaggagggagaaatggaaccatggtcaccggaaagaaaaacctggtacatggaagccactcaaacatggaacgttcccattgtactcactacatccgtccaatacttgaatgccttatacgcatccggcaaacagtatgtgcggcgcatgcactccctggcaaatgccgttgttatttttgacgaagtgcaagctattcccccaacctcactacggctttttgaacattcgctggattttctcgccggcatctgccacagcagcaccatccgctgtacggctactcctccggaaactgccacggaagacggaacgcatgctcatctcatcgaaacacctattattccggacagccaagcttacttcgatcaatttagccaattacgtcaatgcgaggttgtctgtgaacggaaaccctccaattactggactgtagaaaaaatgagggacttcatcatggagcaagcttcttccaaaggccccaccctcgtcatcgtaaacaccaaaaaactggcctccaaactggcctgcgcctgccgggacctgaatacagaggcggacgttttccacctcagcaccaatatgtgccctgcccacaggaaagaaatcatcacgaaccgtattgacaaaaaatctctggaaaaggccagaaggaagggaaaagccgttgtgtgcatcagtaccggcctcattgaggccggagtggacgtagactttgacgtaatcatacggagcgtggccggcctggattcttgcactcaggcggcaggccgatgcaacagggacgccaaccgttccgggggaagagttatcctgattaatcccgcaggcaatctggaaagactggattttctaccggaacttgaaatcggaagggaaattgctatgggaatgatttgtgatcctgaagaaggaggaattctgggaaataaatccgtttcgctctattttaaggacttctacggcaaactcacccgctctcataatcatgatcatctatcctacccgtttatatgctccaacgtcgccaccaacatggaggatgcgctatctcaaaatttcaaactgatgacacatccccgtcagcagtccaaatatgctcccctccgtcttttccaggcctttgactcggcagcacgccaatatcatccgatcaaggatgatacaatagctgttatcaccccttatggaagaggggaagaatgcagggaaaagctttggaatatgaatcctcatacggatgaagaatgggaacaatggaatgaatggctccaaaaagccagagcctattccgtcgcgatttccagccaacttcttgaaaaatacttgaattcgggagacattatgcgtatacaggaaggagtggatatttatacaacaatacctaataaatatgatccatttctgggctttctcacagatcccggagagacttccggtgcgctgaccgtttcccagatttaaaaatttcaacagctttatattcatgcttaatcaaatcgaatttaaggtctacgggaaatatgcgcttttctccgaccctctcacccggataggcggagaaaaatgttcttatcaaattcccacttatgaagccctgaaaggaattgtaaaggcggtgtactggaaacccaccctgatctggttaattgacgaggtgagaataatgcgccctatccgtctggttcccaaaaatatgaaactgatcaaatatcatgaagccggggcggatttatccgtatatacctaccttcaagatgtggaatatcaagtcaaggctcattttgaatggaacatgtaccgtccggatatgtccaaggaccggatcgacggcaagcattatgaaattgcccggcgcatgattgaccgcggaggacgtagggacatcgcgttaggaaccagggaatgccagggatacgtggaaccatgccggtttggagaaggaaagggattctatgatcaatatggagacacctccttcggactcatgttccatggtttcaattatccggatgaaacgggaaaagaggagctctccatacgtttttggagtccggtcatggaaaatggaacgatccgcttcgtgcgccctgaagcatgcgaaattgtcaagcatgtacgccccatggcggcatgcccgccaagatccagcggactgaatgatctgagcctgggagaatgaaaggaaaaagaaaacgatgaactggatgtacgccttatacgccacctatgaacaaaaccgtgattatgtgggtcgtattgacaaagaaccggcccacggcaacaggaaagaacgcctcattacccctcttctgccgctgtaccacagcatgcagaatgctcacatcaccatcacattgaacagacagggagagctaattgatgcatccctcaacaatcagaacagtcaacccaccattatccccgttacggaagcctcaggaggacgcaccagcggagcctgtgcccaccctttgtgtgacaagctccaatacgtggcaggtgataacgctgactatttccctccggaaaaatccccggccaaacggaccaaacaactcaaaaccctgcaggcatcctacgaacaatatgaacagcaattatcggaatgggcggcgtttgaccccgggaatgtcaaactgaacgccgttctggcctatattcgtaagaaatccctgatcagggacttgatcaagaaggaaatcttacatgtggaagattccaccaacactctgcttcctgtatggaaaggggataaacaggaaatgcccgctatctttgaatttctgggagcgtccacccaggaaaatgcgttcataagatggaagatcaacaacaaggatggaaaccctccggaagtgtatgaagaccccgccatgtacgaatcctggcgaatttatacggaatccaaggccaacaaagaagggatgtgctatgtcctgggaaaaacagcacctctggcaaccactcacccggcacgcatcagaaacgcaggagacaaggctaaactcatttcttccaatgacagttccggctatacctaccgcggcagattcattgaagcggatgaagcgtgcggagtaagtacggaagtcacccaaaaagcccacagcgcgcttcgctggcttatctcccgccaaggctggtatgatggagatcttgtcgttcttgcctggtctcccggtctgttgaaagttccgtctccctgcggcaatgtgcaggaatgggaacactacacgcccgacaagccaacaccgaatgaccaggtcacccaattggttaagcaatttaaaaaagaactctccggaggaggaaaagagctgctgcggacatcattgaatgaaaacgatattaaaaaccgtgttcttgttctcagcttgaattctgcgtcgccggggcgcatgtccctctccagctttcaggaatttaccgtctccgaataccttaacaacctgctttcctggcactccaaagccagttggaaacagcaccttcctaaagacaaggaaggaaacgaccgatcttatattggcgcgccgtctatctccatgattgtcaaagcagtgtatggaataaaggtagacgataaactacgcaaacacgccctctccagactactaccctgtattctttacaatctacccatccctccggacctggaaaagcaatgcgtcatccaggcatccaaacgacatgccatggaatggtgggaatgggaaatgaccttgggagtatcctgttccgtttatctttataaccatccacaaacaaatacttcgtcctcagataccatgagccttgatccaaaaatcacagatcgcagttacctcttcggccgtcttttagccgttgcagaagccatcgaaacatcagcgttaaatatcacgaaaacctcccgccccaccaatgcggaaaaactcatgcagcggttccagcaaagaccgtcagaaacatggtccatgctggaaaaaagcattcagccctatcgcaacattttgaaaaaaaatgaaaacaccgtttctttcttgagaagctatgatgcttacatagacaatatcatggaaacattcctcatgggacaattcatggataacgggccattaaccggggcctacctcctcgggtaccactgccagagagcctttatttacaaaactaaagaagaaaaaaatgctgaactagcaaaataaatcttagaacaaaacattaattcaatactataaaaccacatcatgagcattaatcataaaatcgactttgccgtcatctttaccgttacgaacgctaatcccaacggagaccctctcgatggcaaccggcccagaaccaccttggaaggactcggagaaatctccgatgtctgtcttaaaagaaaaatccgcaataaactgatggacatgggacaaaacatctttgtccagtcagacgacagacgtgtagacgactataaaacattgaaagaacgtgctactcccatcctgaaacaaaaaggtacgtctgctgaactggcacaaaaagcctgtcaggaatggtatgatgtgagagcttttggacaggtctttgccttaaaagacaaagatgcggcaaaaggcaccggcgtctccataggaatcagaggcccagtcaccattcaaccagcctttagcaaagatacggtgaatatcactagtacacaaattacgaaaagtgtcagcaatgacggagacggcagcaaaaaatcttccgacaccatgggcatgaagcaccgggtggacaagggaacctatgtcttctttggagcaatcaatccacagctggcagaactcacaggcttctcggatgaagatgcctccattttcaaacaagtgcttcctcagatgtttgaaggagacgcctcctctgctcgaccggaaggcagcatgtctattcaaaaagtcatttggtgggagcataactgtaaaagtggtcaatactcttctgcgaaagtccaccactccattgaaatctccgaggatggaaatattgtaaagaaatatgatctaccgggattaaccccggaaatgattgaaggcttctgagctgtttcttttcacgaatgtcaaaacacccttcactaaaaatgaagggtgtttttaatgagcgttatagccaaatgctccttctcgttctagggatattaggccgttcaatctacgacatctaaatccacgcactcatgagagtgcgacggagttcggcttcaaggttccgattatcgtcgatgtttcaatccacgcactcatgagagtgcgaccactgccgggaaaaaatgcgggtttgtttcaatggtttcaatccacgcactcatgagagtgcgacgcttcgccaggatgaccagctcccgataaagccggtttcaatccacgcactcatgagagtgcgacagcaaccttctcggcatccacaacgtcccccatggtttcaatccacgcactcatgagagtgcgacatccgcgcccgccgtccagcccgaagccgtcaaggtttcaatccacgcactcatgagagtgcgactcttaacggagccacaaggcttcaaatctcatgaagtttcaatccacgcactcatgagagtgcgacggaacccggcgtcggcgtcacgtcctgcacattggtttcaatccacgcactcatgagagtgcgactgcccctgttgcagcagattatcaacaacacgacgtttcaatccacgcactcatgagagtgcgacgcgggacaagggcgcttgtctcccggttgaacggtttcaatccacgcactcatgagagtgcgactgtaagcaagattgttagcaggaatgatgctgtaagtttcaatccacgcactcatgagagtgcgacatattaaaacgcttaactctgacgtgtacgagggtttcaatccacgcactcatgagagtgcgacccggtatttatttttgccggcatacggggaaacagtttcaatccacgcactcatgagagtgcgacttttccccccggtggacatagtatgaacggtagccgtttcaatccacgcactcatgagagtgcgactggtggaggatgcggagcgggacggagataaattgtttcaatccacgcactcatgagagtgcgaccggaaagactttgcagtccgtcagaattcaaaaagtttcaatccacgcactcatgagagtgcgaccagcccgttcggcatcagctcattcgtccctactgtttcaatccacgcactcatgagagtgcgacgaggttatcgcggcaaagttcccccttccaaaaagtttcaatccacgcactcatgagagtgcgaccagcggttccgagtaaaaaaggggcggctccgaagtttcaatccacgcactcatgagagtgcgacaaaaagacccggagaacgatggcccaagatggagtgtttcaatccacgcactcatgagagtgcgactccggggcgtctatgacactgattatcaacagtgcaacgggcgttttgcgccaacctcccatgggaggtacaaagattccaggtcgtaaaaagagatgatagttgtcaagctcagaaccccaacggattacgaaaatcgccggtattccggaaatttcctgtgagctcggggtcggcggaaggaagaccgggagaggagcttttcatgcgttaaaaagcccgcatctccggcaaccagggcctgtgcacgaagcagaaatatcttaacctgttccctcttttccgtccagaattttgtaggcctctccccggaaaccgttttattctgttttccacaaaagaagaggcgccccgggatagccgtggtcccgaagcgccctgcggaaaatatccgcggtttacatgatgcttttgcgcgtccacctgttcaggctcaacagccataccaacgccgcggagacagcggaggccagacaggccatcaacggaattttcacggcggaggacagccctcccagcccgatgaagttcacgaagtcataggagcactggacaaagaagaagtggcacagatacacgccgaaagtaagcgccgccaccttgctcagcactggaccagccttgattctgagccggctgacgacggcaaagatggcaaaggtcatcagaaatacattgattccggagaaataccagagcacttccagcttggaatactggccggggaagtgcttctgtgtttccagaaagccgaagaacgtaacggcaaaaccaatcaaaaagaggggaatagtaatggacagcgtttttttccagctccaggccagtgggtatttggtcaggtaatgcgccagcaccatgtatcccaggaatccggaaaagttataaaacataccgtacggattccaatcgcaaacacccagaatacccatgttgccgtaattgccctcataacccagtgccggagcaagcatctggatgtaggggagagtcatgctgaatatccagatgcccaggaagattttcacatctttccttctggcttgcgtcagccacgcgctcatgatgggcatgaagaggtacaggcctaccagcatgtatacataccacaggggcgtggtatcatagttgaagttgaagaagaaggtatacagcttgccgacggtggcactccaggtataagtgtccatcacgatgttggggctggccgtttgaacgcctgcggcaaagtatccgaagtagagcaagggaagcaccagtgaccagacaatgagcggaaccagcaccctcttgaggcgcctggagtaaaaagcgcccatttccaaggtgacgggaaagagcaacactccggagatcatggcaaacaaaggcacgcacggccgtaccagacttccccagaagacagcggacttaaagttgaaggaaccgtcaaaacttccaacgaacggatcacagcaatgggccaggacaacgaggaagcaggccaggatacgcagaaagtccacccaggcgatgtggctgccgcgggagttcaatgattggttggtgttcatggttacgtgggaaaaaaagcgccgcgtcatcgcaaacgttcctgataatatacccgtttcccggaaacgttctatcatcaaatggagaaaagaaacaaaaagcccccaatccctccctcccggcaacaggggaaaactcttcgggaaagcctgcgcttcctgcaggcttccacgcctcttcccccataagaatcacggaaccttttcctacaccaccggaattgttcaccgtgaggcttggtgaaagttttctcattcggcgaagttcatatttcattcaacaggatactcctcttccccccttgcaaagaaaactttttcccctcctttcagtgaagagctattccgaaacggaaggggaacacccccaacacccatgttttccttttggaccggcaggaggatttcccttcatttttatggctaagatacccggaagccgggattcaggccttctctacctttcacacgctgtctgttttaaaactgcccggcggcggtataagattgccgtagcggtgaacggtttcggaaacagcctgttcccggaaataccccagcagttccacccgaccattggcaagcacgggacggtccagtacttccacatcccaggcatgggcggcattggccagagcctcggaaatatctgttccacgcaggaaccgtacgccttgaagggcttccggcatccgaccgatcaattccgcttccgtttccaccgtcagggaagcatagtaaccatgcattttctgaatccaggggcggctcgtccctatgctcaggtgcaggagcaccccgcacagtttcgcccccagcagcagaatggcgacgtcatcgtcggacatgttttccacacgggccagaattcccttcaccggggtatagcggaagatattattttctccgtaaacacgggagggatcatgatccacgccgaattcctccatccaccacttggcctgggaaccggccgcggaacggatgcgcttggcgcagtccggcagctcggaacacagtttttccaccagtccggagatacgttcacccggcgtgcgcaacttctggggcagcgccttttcctcccaacttcccagcatggtaaggtagttgggacctccggccttggctccaggccccatggaggaatggttccacccgccgaacggctggcggcggacaatggcgccggtgatgacacggttgatgtacgcgttgcccacctgcactttagttttccacaaggcaatttcccgttcatccagggactgaaggccgccggtaaggccaaattcggaatcgttctggatgtcaatggcttcctccaggttttccgcacggatgattcccaataccggaccgaagcattccgtctgatggaaccagcttcccggtttcacccccagccggatgccgggagaccagaggcacgggttgtcttccgaaggttccggcttgagcagccattcctccccgggttccagctgcgtcagcgcacggagcagattcccttccggttccctgatgagcggcgtcaccacggagttgacttcccaggatccgcctaccttcaggctggcggcggcatccttcaactgacgcaaaaaggcgggattgtcataaacggaagcctccacaatagccacgctggcggcggaacacttctgtccggaatgaccgaaagcgcttttcaccaaatcctttacagcctggtccggatcagccgtagcagtgatgatcatggcatcctttccgctggtttcagccagcacatgcaggtcaggccgcagttcgcgcagcatttttccggtgcggtaggatcccgtcatgatcacaccgttcaaacggggatccatcagaaacttgcgggaaatttcattgcgcggcatcggtacaaattgaaggacgtttttaggcacaccggcacgccagaacgcctggacaatctgccaagccgtataaacggccagttcggacggtttgaacaccacggcatttcccgccatcagggcggcagctacaccgcccgtcggaatggcgaaggggaaattccagggagacatcacgcaaatgatacccagcggggacatttccacgccgtcgttcattccgtcgcggtccaagccttccgcgtaatagcggcagaagtctatggcctcgctcacctccacatcagcctccgtgggagctttcccggcatccctcaccatggcagcaatggcttcccccctgattctggacagctcctgcgccgcccggtgcaggatttcagcgcgttcgccaatgcttttggacgcccaggaggagcggaccctgtctgccgtgaccaaggcatgttcaacctggtcaaaatccgcataagcgaatttataggaaacttcattatggcgggacggatcgcgccccacgccccatagattagtcgtaatttcctcaccatctataaccagagggatttcctcgccggatttttccttctccgcggcaatcagcccgttgatccattccgcattctgccgcagggaccagtccgtatcccgctcgttggcaaaggcgtcccggtaatgtgagggttggatgggatccgcagcgcggttctgcgtgcggttggggccgtacttcacctcatccttttcctgacaagccttcaaaaacttctttttctggacctcccagctccgggcccccggtgtcatgccgaagagatcatgcaggaagttctcctcactggtattttcatccagtctccggaccaggtaggcaatagcgctgtgaaaatcttccttcaaaaccacaggggcataaagaagcagaccgtccgccgcctggcggatgacccgcgcctgatggttcgccatcccttccagcatttcgaattccacctggtcacgcacgccttcccgctcacgcagcagcatggcataacacaaatcaaacaggttgtgggaagccacgccgaactgcacatatctggcattatccggcatgcagccgtaatggagcattctcttgtaattggcatccacctgggctttcgtgccatacggggcctgcgcccagccatgcatggaggcctccaccttctccatcgccaggttggcgcctttcaccaggcgtattttgatgcgcgcgcccccctgctccacgcgttccttcgcccaggcgcacagcttcatctgctcctcccaggaatccggcaaataggcctggagcacaatccccgcctccagctgcatgaattcatcctccatcaacgtacgtttgaacgcttccgccgtcagatgaagatcacggtattcctccatatccagattcacgaacttgggctttctggaaccgtccggcaacgttaccgcattggtaatggccgcccggtacaggatgcgcagacgctcctgaatcaatttgacggtttcttcaaaggctaccagatgaatctggctgaaaatggctgaaatcttgacggaaatatagtcacagtccttgtctgtcagccggtccacgacctgctgaagacggtggtgcgcctcgctttcacccagaatggcctctcccagctggttgatattcatccggatgccgcccttgcgcctgcggcgcaggtgggggcgcagttttccatcctcggcaggaagaattacattggagctctcctttctcaactggctggtaatcatgggcatgactacacccggaaattgagcggaaaatctcccccccattttcatggcgaaacggtccgccgcagacaaataacggggaacgccatatccgtccaaaagatagcggaacaactcagcaccccgcgccggagaagaaggacggaacacacgatccgccagtgccagcgtaaacgccttgcccgccggatcattcatcatgcgctccatttgctgcgcctgcctcttctctttccctctcatcccggcattcgactgctttaaaatggactccgccagttccacagccttggcggccagttgctggtcagtccattggcctcggcgagcctccgccatcatgtccgggatggatgaatctgtcataacggttcgaagactagccccgggcaggggcaaaatcaagccaatttgcccgggccttcctgtggaaaggggaatcacggaggaaaacgcatcccttgattccgtgacggaagcaggggggccttcctgtccatttccggcaactcaggaaagacacattaatcataccgcgcagccgccagacgagctcttctcagctcttccctgagctggtgcgcccgtctgccgcaaacgctggaacggttcatgtcccggacctcttccaaaaccgcaaccgcctggttgaaggcatcctcgctttccggagtgtgggcttcccggtacagaacctcttccagccgcacccagaggggatgcaccatggagagcagaattaactggcgctcctccacggataacgaggggtcatccgcgcaggcacgccacgcttccaggcatgttcgtatggaagaagctttgcaagcccggaaagactcgccaagcaattcggccgttttcctgtttttctccagacgaaaggccgcctcccgggcgttaagaaaagccggaaccgtacagtccaatttttccagacgcttcatggtgccaggataatcccgaaaccaggcctccggaggcacctgttccagttcccggcaaatggcggaggcttctgccgcaggatccccgcccttcggaatatcattcacccgcgtcaccggccgcacgcgctgcgctttttccgcaagcagggacactctttcccgcagagaagctgcagaggcccctccttccaccaggtcgaacacacgtcctttggagtcaagaaaaaccacggaaggcagcatgcgcacaccatgcatcgccgcacgggacaggctgccgtcttcttcccaatccttcacggagggatgtctaggaaccgtgacaaactgcacgtcacgcacatattcatccagcgcgcggcgttcttccgtgcccggctggagcgctttcaaccaacgggcttccgctgaaccgggttcctctgaaccgtacacaaccagaacaggggatggaagggagggagccgcagaacaggagacggaaagggcatccatttccgcacgtcccggaaacgccagagccaaaaatgcaatgaccgctaaagtcctcatgaataaactgccatccatcagccctttctgatggtaatgcgcttgtaacggctgtccccttcttcggactccgtcacaattccttccatggactgaagggcattatgcaccaggcggcggtggtaggcattcaacggaggcatcttcatcggctttccgctctcctggacgcgttcggccagggaacgggccttttccagcaaacgggcttcgttgcgctcccggtaatggtcgcaatccaccttcacgcggggagcatcctccatcttgcgctggatcatgcggttgaccagatactgaaggtcatccagcctgtccccgtcacccccaatgatgtactgtgaatccggggaggaaatattcaggcacacgatgccgtccgtttccgttacttcgatatccgcggaaaaccccagcgaagccagaaggctcttcaaactctgttcagctatttcttgcaccgtcattactttaaattaataggaaaagggttccataccggaaaaaccgcctcgcgccggacggtgcgagccttttctccaatacccgattgacataaaaatcataacctatttattcccctcgtctatgaaaatttgtggaagttccgttccatatcatgtacgcaatgccgtccctgccctgccgttccggcaacacggttccgttcctccttcggaatcagatgcaggaaacaccgcttaacaaggaggccactgttttccgcctgcccgcggctgtaccccggttatctccgcttctccctgccgcaaatgaaacacaggctgcaggcatcgcagccatgccaatcaaacaggcatttcctcacagcccgttctttattacataaaatattaatcaccagtttttataaaaatttttcatccgctccggagaaatactgatgacaaaacaggacggaacatacccggaaaaagggaagtcgaactattacccacatagaaaaatccggtccctcatgaacaagccaatgaaaaaaaagaaaccgctcatggaagacagcgccgccccttttcccaacggaaaagaagctgctccccattatacggatacaattgatccggaattgatcaaacccactccaaaacctacgccgcccaatgcggaaccttccgcgcccggttccatgaagatgccggataacgctacggaaaaaatcagggagctggatgccatgcgctccaacggcatggaacaggccctcacaagcaacctgggagttaaaatatccgatgatcaaaatacacttaaagcaggaagcagaggcccctctctgcttgaagacttccactttctggagaaaatggctcattttgaccaggagcggataccggaacgcgtggttcacgcaagaggttccggggcacatggttattttcaggtgtacaaatccctttccaagtacaccaaagcggcttttttgcaggatccgggagaaaaaaccccggtctttgtgcgtttttccaccgtgcagggcttcagaggatctccggatacagtaagggatatccgcggttgggctaccaaattctataccaaggaaggcaactatgatctggtaggcaataacacgcccgtcttcttcattcaggatgccatcaaatttccggatttcgtccatgccgtcaaaccggaacctcacaatgaaatgcctcaagggcagacggcccatgactccttctgggacttcgtctccctgcagccggaaactctgcacaacgtcatgtgggccatgtcggaccgcggcatccccagaagcttccgtacgatggaagggttcggcattcatacgtacaaactggtcaatgaagatggaaaaagcactttcgtccgtttccactggaaaccgctgtacgggaaaaaatccctggtgtgggatgaagcccaggtattgacaggacgcgatcctgacttccaccgcaaggatctctggcaatccattgaagccggagattatccggaatacgagctggggctgcaactcatcccggaagaggacgcagaccaattcgacttcgatattctggacgctaccaagctcattccggaagcactggttcccgtggaaatcgtcgggaaaatggtgctgaaccgcaacccggacaacttttttgcggaaacggaacaggcagccttctgccccgccaatatcgtgccgggcattgatttttccgatgatccgctgctccagggccgcattttctcttacagcgatacccagcggcaccggctgggaggagccaacttcacggaaattcccatcaaccgccccatttgccccttccacaacaaccagagggacggcttccaccgcatgcagatagacgcctcaccggccaactatgatcccaattccatcgggaacaactggccgagagaaacgcctccggagaaaggcggcttcaccaccagcccccagacggtaagcggcgtcaaggaacgtttgcggagcccctccttcgcggaatactattcccacccccggctgttctggatgagccaaactccggtggaacaggagcacattatcaacgctttcagctttgagctgggcaaggtgacgcgcccctatatccgggaacgcgtggtggaccttctgacacgcattgatccggacctggcaagcggagtggcccgcaacctgggaattcaactcaccagggagcaactcagcagggaacttcccaggcccgtctgcggcctggaacaagatccgtcattgagcctgtatgcccatacggacggcaacctcaaaggccttcgcgtctctttactggcagcggacggcgtcagcctgaaatccgtgaaagaaatctgcgatgccctgcatgaagaaggcatccacccccaaatcattgccccgcacatgggaagcataacaacggaagaaggggaagagctgtttgttgacggaaccctgtccggcactccttccgtcctgtttgactccgtcatcgtcccggaaggggaacaaagcgtcacaacgctcctgaaagacggagatgccaagtaccatttgcgccaggcctacaggcacctgaaagccatcggactgcccggcaacgccaaagccatgcttgaggcagcctccctgccccaggatatggatgacgccgggctgctcatgccgaaggacaccaagtccctgatgccccccttcatcacggccatgaaacagcaccgcgtctggagccgagaacctaaaacccttgatttcggagcctagattcgtttcttatacaggaaccgcttccatttacgggctgccccgccgaaaggtgcggcagccgtttttcactaaaaaatccgggggagttaaacaacacttcgggcaaattgaaaaagggagggagatacactcaaaacgggaacggaaaccggaatacagcatgatgataatgccttcttaaaagaaaaccccgcaagcctttaaacttgcagggtttattaatggtacacggagagggattcgaacccccgaccaactgtgtgtaagacagccgctctaccactgagctatccgtgcgtgaggtggaaggaatatataccgggaaagcaggcccggcaaggagaaaatgaaaaaaatgcgtcctcatttccctgttctccatgactgtaaaatccggacaccgccaattccagaaaatggaaagaaggcagacaaggatttcctgtccctttccgggaatatgtttccgtattatttccggaacctgttcccctacctgacatctacgcgccggagcgcgcggtaatgcaggataatgaagagaacgcacaatacggcttcgaaccaatagaacatgtctaacgcatcccgaccggaagtgaaaccgtaggaatgcagccctactccaagcatgttgacgccccaccaggcaaaggcaatgataacgccgcccactacattgctgaagtggagcagccaggaagacagccatccggctttccggacatgcaatacggtcaattgccacagtacaatcatcaatgctccgttttccttgggatcccagccccagaaccgcccccaggattcattgccccaaatccccccaaaaaccgtccccaccagcgtaaacaccagggaaaaacacaagatgccgtaagccatgcggtccagggattgttccgtttttccactgatcaggcgcaggggggaagccagcaggtatatatgggagagcaccgccgccagcagcccggccgcgtaccccagcacaatggtaatgacatgggtggaaagcaggaagttggagcgcaggatggccaccaggggatccatatggtccacagcctgggaggcttcatacagaatacccatctgacaggagaaagccccaagcaaaagccccgccgccagtacgattccctttttactgaaaagttccaccacaagagcgcagagcactcccatgcaggcgatgaaggcaatggtttcatacgtgttgcccaccggggacctcatggtgatgagcatgcggatgaccagcgccgcggccagtactccggttccgcccgcgcctgtcagccacgccaggccgaaacctccgggccgaagaaaacgccgccaaaggggagcgttggcggcagggcggaaaagcgcacagagcagcaggcacacgaacgccgccacaaaaacggccagggaaatataaagcggatccagacggtagtagaaaatttctctttccaggctgtgccgctctccggcggaggcagcttcattgggttgcgccagcttttccagcagcaggccttccgctttcatccgcagtgcggaagcctccgccccttccatgccgatagctttgcgttccagtagggacgccattgccaaaaaggctccggcagctttatccggggcagccgtccacaggcgttctccatcgcggccggcagaaggaaaccagcgtgggaattccatccgttccatggcggcagggttttccagcatgatccgggagacaagcatccatccccgcattacgtcaaagttgcgggaaagggacaaaatttccttctgggcttccgtcagattcgtttctcccaacaaacggatttcccggacggcacgggtcatttcctcccagcgttccgcaagctgcgcgtaggagtattttttacgcttgtctttctgatccggcagatgcaggcgcctgaccacctcttcccgattgaccaggaaaacagggtattgttccgccagttccggacggaacatgcagtccagcatccattccaccggggagagcttccttttcccttccggcgtatcaacaacaaagcttcttttgcccagcgtccggagcagatggaaccccgcataagtagaaaccggcttcaggcggccgccgtccaggacggccatggccccggcccgttccaccaaagcgggagaccagggcacataatttttcaccagaacaggatgggcggcaggacgcgctgccagcatgccgacgccgaagattgccgctaccagcaggcaaatgcctgccagacgcaaatgttttttcccgccgggggcggaagcggcctgcggttcagccgtcgccgccgttccggcagatgccagaccgggtttgcggcgcaggtatctgccaaaaacacaggcaaaatgccacagcaatcctatagcgatgatgtaggaggaccatttgggcatttgctccaggggattatgggaagcgcggagaatggagatgagcctgcccggatgcagggaatcctggccccagctcatctggtacagcgtccagccggaaagacgcaggggctcgttcatgcggataacggcgtcatattgaccgccggattccggaaaaacggttatctgggattcataggatttaggcttggaagtccccggataaaactccggcacaaaacggttcaggcgcaaatcaaacggaagggaatattcatgcacccggtccccctggggcagttccacctgttccacggccaccgtcattttgttgcccagcatgataccggccagcagcagcaaaattcccccatgagccaccagcacgcccgcgtgcctccaagtccaccggatgcggaataccccgcctatgagcaggttggcgaacagcaggacacaggtaatgcccatgccgggcaaaggcagggaaatcagggagttctccccgcccagcggtatcagcacataagccgccccgaaaaaagactctatggcagcctccgcccccatggcagaagacagtcgcacctggtgcagcgtcccggcaaaggtcagcaccagaaggatcagcatcagggcaatgcccaagccgtagcttccggcaaaattccagaggctacgtccatattttttccataccgcatccgttcgttccctgtccatcagcgtaaggcgtccgtagtctaaaaagagggccgattgcacgatcagctcgtgaaaccggccccaatcatattcctggggaaaaggttattaaaagttgtccgccagttcttcaaagaatgcctggggatgtgcacaagctggacataccttgggggcagtggaaccggtatgtacataaccgcagttgcggcacttccactggatttccttctccttggcaaaaaccctgccttcgcgcacattttcagccagcttgaggtagcgggcttcatggtgctgctccacggaggcaatcttgcggaaagtttccgcaatggcggggaatccttccctgtccgctacttcggcaaacgcaggatacatgtcggaccattcgtcatgctcgccggcggctgcggccagcagacaatcctccgtagattccaggggagccgtgcagacggcgtgcgttacttcaacgcaagcgtctttcagcagtttgaaaaataccttggcatgttccttctcattgtcggccgtttccagaaagatagcagcaatctgttcgtaaccggccttcttggctacgccggcaaagtaggtgtagcggttacgcgcttctgactccccggcaaaagccttgagaagattcttttctgtttctgttcctttgatggatttcataaattagtcatctggttgcgtaaacgaaagcatcctaataagacgccgtgaaaaaacaagcaaatattgaatgaatctaaaaaatagacatatccggaaaaacatacggcagtttctccattgggaaaactgttgccatgcacgcttctgctgtcccccatacgcgccggcagcaaaacggcatcccgggaaacaggcaggaacccgtaccgcaacatcaggcctaagcatgaaccggatcatttgacaccccttgtgcaaatagtaaaattaaacggaaaaaacccttaagctccatccatgaatcccgccaatacccccttattggaaaccgagagattaatactgagaaaattcacggaaaatgatctggaggccctgttcaacatttacagcaatgaagaggtaaacacatatttgccgtggtttccattaacctccctggaagaagcggcgtccctgttcaaagaaaagtaccaggaagtgtacaaacggccttacgggtatcattacgccatctgcccgaaaaacagcaaccttccggcagggtatatccacgcaggcacggacgacagccatgacctcggctacggattgcttcaggagttctggcacagaggctttgccacggaggcggccagggctgttgtcgcccggttgaagaaagacggcatgccctacatcacggccacacacgatatcaggaatccccgcagcggaggcgtcatgaaacagctgggcatgcgctaccaatattcttatgaagagctgtggaaacctaaaaatattccggtcactttccgcatgtaccagttgaatctggatggacaggaggatcgggtttatcaggaatactggaacaggtcatccgtccgtttcaaagaaactggtatttgaattcccaatacccggcctcatcttctagagttccttcccgccctgggaaacattgcggatacctccgcatccggtcacctttccaccggttttccggagaaagtcccgctccacggttcttccagcctgtccggaacgctttccaactcccggagtattttctcccgctcccgggaaatccgctcctgatccgcagaggccggaacagactgctccccgggcagaggcatcagcccgtccgccatcctgccaccgtccggggcaaccggcggagcaacacccttgttgtcttcatccgtttccggttcaggacagaccggcttctgctcttccatctttccggaactttccggaacagccaggttccgatacaggaacaccaggtcccccgcctccacagcgccgctgcggatatccgcaggaatgcgcgcacgccccatccgttcctccgtcacaatcaggttggcaactctgcatttttcttcccgtcccggagattgggagataagcacggtccccggttcataaacattcccggccagagcaatcagcacataatgatgattgggatacacctgctccaccttgcccacatatacggggggaggggctgcttttttaacgggctgctgcacctgctgggaacaggaagcgcccagcactacaaacgccgccagaacaggcagggaaacaattcgtctcatggtgagttttttcgtcgtttcattccaccagcaccttgcgtggacggttggtattatccgccggggcaataatgccgcgggattccagcaaatccatcatgcgcgctgcacggccgtatccaatgctcaaacgacgctgcagcagggaggtgcttaccttacgttctacaacagccacttccaggcacttggcatagcactcctcctccgcgtcatccagcggactgtccgcacctccgcgggaaggctcgtccaaggacttctgaacctcttcatggaatttctgcttggcctgggaagcacagtgggccaccagggcttccacttcatcgtcagagataaaggctccctgcgcccgctccacctgggcggaacccggcggcaaatacagaaggtctcccttgcccaccagtttctccgccccctgcctgtccaaaatcacacggctatccgtaccgctcgccacctggaaagcgatgcgcgtcgggatattggccttgatcgtccccgtcaccacctgccttctgggcgtctgcgtcgccacaataaggtggatgcctgcggcacgggccttttgggtaagacgtccgatattcgtttctatgtccgctcctactgtctgcatcaggtccgcaagttcgtcaataataatgacgatgtaggggaagcgttcagggataactccgtcgtcctccagctccagttcatcatcttcttccacaggccattccccctgggattccaggtctctggcaatggattccgccaaagcttcatccacctgcccgtcttccggttcctccgtctcttgcgcaggaacatccggcgggcgcttgttgaaagcttcaaagtttcgcacacccaccttggcaaagcaatggtagcggtgctccatttcatttacgcaccaacgcagggcattgggaaccttcttgggatccgtcaccaccggaacaatcagatgcggcagcttggaataaggctgcatttccaccactttcggatccaccagaataagcctcagttcatccggacggaatttcagaagcatggaggaaatgatgctgttgatgcacacggatttcccggatccggtggcaccggccaccaacaggtgcggcatggatgccaagtccccgatcacggtgcgtccatacacgtctttccccagcgccagcggaatctttttcttgggggaacaaaaagcaggatcctgcaaaagttcccgcaggggaacggctaccttcttccggttgacaatttcaatacctaccgtatccttgcccggaatgggggccacgatgttcacgctttccgccttggtcgccagcgcaatatccttcgcatactggtcaaaagtatttacgcgcacgccgcgcgcgggatacacttcataacgggtgatggtcgggcctcgggtaatatccccaggcgtcacgtccacgcggaatgtcgtcagggtatcaataatcttctgctgtatttccagcatttcttccttgtcctctgccgtagggccttccggcttttcttcataatgcagcagttcaaagggaggcagctcatactcgcggaattcctccgtgggcggagtggacaatttggaaaaaggctgctctttaggcgcaggcttcatttccgccggttccgcaacggtaatcctggggcgcggagccaggggaaggcggccctgggtgcgcggggcgctgggaggcgggacagaatcctccggcttggacggagcaaccgccgccgcttcatgatacaaactttccagatcgtccccggtgcgctgcagacggggaacggaagcccggccctttctaaccggtctgggagcggacaaagcggcgtcttccatgctggccctcacgcgggcagcttccctggcaagcagagcggtctgtcgcgccagtcttttttccttcctgttcatacgccaggcacgccattcccgcagcatggcccggcaaaacggacggggacgcatcccgactgcataaaccagggccagcaaatagcccagcccggaaaaagccagcacagcggatctcccggccaacggaagaaacagaccagttcccagcaaatggcccgccagccccccggcgccctgaatctggtggcgtgccacccattcattacccggcacatgcccggccgtcagaaacaggcatccgaataacagcaggaacaaaccgccgtaaaccacgcttcggggcagccttccatggtggagcagacggtaaagcccccaccactccaacaggataaccagcatccaggccatggctcccagcatccaataaaaaattcccgcaccatataatcccgccgttcccagcacattggaggtacccggtataaccagcccggagccatttaaataactccagcctatttcccgcacatcaaatgtcagcatagcagccagaagagccgccccccccaacaaagacacggcaccccatgccattccaatccaaacaggggaacgcccctcttcatgctcaaatgcatgacgctcctgcatatccaatgccatacctgtttctatcctagcaattcttcgccccaaactcaaggctaaacagggaagaaaaagaatcgcccgaatccgcttccctcaagacaggaagtgccggcttacggaccggaaataaggttttttaaacacttttgccactctggaagagtatcgctaggaattcctttttttacctgagaaaagaccgtccctacaccgcaaatcaataaaaccgaatcaatttcaatgactatttttcatatccatttgattatttattattatcctaaatatctattacaaaaaatataccgttcgacattttttcatgagttatgaaacatccagcggatttcaaatcctattaaaaaaataggaatattatgatttagtataactagataatgattagcgtttaaaaaatttttaaccatataatttttacaacttttttatcttttccgaactcggaaataatgaataagcttttttttttaaatgattgctattgacaccggatttgaaatccgctaattgagaatgctcttcctcatgacattgaaattacaatccgttaaccaggcacgactttcatgtgcaggcaagtcagcggccactccccggtattttgttcggcggtactgcttctgccagtatcttttcattattgatgattatttccccgctttttccatgtgaggggaaatatatccccctttttcaaacccttgcttgtttcaaacaaaaaaaatcaaaatcatcaaatttaaaatgatgactgaacatatagcggcctttttctttcaaacttccggaagattgaaagcatggagggcatcacgccattcccgtggtgcttccggggcaaggaagaaaatcctttgagccggaatggcctcttcccctgtttttatcaccatctttcctcccaaaagcaacgtttcctcctccctcaccaaatgaatacaaacaacctcatcaataaagccattctgtgctccctggccatggccggagccgctctcctgccttcctgcgtcagccccaaggaagtcctctatatccaggatgtttccggaaatcccagggaaaccatcaaggcaaactaccagacaaccatccaaaaggatgaccagctctatatcgcagtcagcagcaagcagccggagctcaccgccccctttgccatgtctgaaatcggttcctccagcggcacctccagtaacaaacccaaaggatatttggtagatgcccagggctgcatcgtcctgcccgtcatcggcaaaatgaaggctgcgggcaaaacctgctcccagctggcctccgacattgccgctactctcaagaacaatgactacatccgggatgcctccgtcaatgttcagatcatgaacttcaaattctccgttctgggcgaagtcaatgctcccggaacctacactattgaaggacagcgcgtaaccattcttgaggccatcagccgtgccggagacctgaatattgacggcaaccgggacgtcacgctaatcagggaaaccaacggaacccgtcaaatcgccagtatcgacctgcgcagcaaggatttgttcacttctccttactattacatccagcaaaacgacatcatttacgtgaccccctcagaccgcaaggtcaacacgcgcagcgatgccgctcaatggtacggctggggtctctccgggcttggcattactctggccgtggtcgccctgtgcctgtaacggacattccgccgctttttcgtccggcttaatcatacctgtgaacggaaatatagggacggtccgattgtatcggaccgattccccaggggttcagtatttccacacaacattccaccctctttcctccatgacaaataataccgctcccactcctcctgttacggaaaatacagaagaaacagctctttccctggacacggtgctgacgatcctgcgccgttactggttcatcatcattctggcagccctcgccggaggcacggcggcctattacctggccggcaaacagaattatatttaccagaaaacggccagcgtcctgatgcgcgatgccaaaacaggcagcgacgtctcttccgaacgcatcatggcggaattgaacatagaccccaacgcggctaacctggccaatgaaagcctcgttctcaaatccaccgcattaatgaacaaagtggtggaagacctcaacctcaacacatcctattggcaaaaaaaagatttcagggagcttgatctttaccatgccacccccttattggtgcactttgaacaaatcgacaaacaacgagcctgcaccctgcacatcacgccgctggatgaaaagcgcttcacgcttggccatcccaatgatcagggggaactcatcctgctggaaggtttttacggaaaaccgcttacgcttccctttgccaccatctccgttcatcccacctccctgatgaccgacgcatggaacggaaaaaccgtcatcgtaagacactctcccgttcttgaaaccgccaacgccctgctccgtggcctgacaattacccgtccagactccaaggaatccagccttctggagatgactctgacatccagcaatccccagaaagccgaagacacgctcaaccaccttatccaggtttacaaccaaatttccaaggacgaacggaacaaggcgtcccttaaaacgaaaatcttcattagggatcgactaaaagaacttggagcctccctgagcgacgtggacaaaaaacttaccgaatttaaaacgaagagtgacatcgtcaaagatgcggacacaaccatgagcgcggacttcagcacctcccaggcgctggaaaaggaaatctttgatcttgaaacccaaatcaaactggcgtccacccttgctgacaatctcaaggaaagcgaacgcaaacatgggctgatctccgtagaaaccggtcttcccgattccggcatcgcccggcagatagaacattacaatgaggcttatctggaatatcagaaaatcgccggaagcgccggctcccaaaacccgattgccgtgagcttgagggacaggatgaattccaccagagcggcggctaacaaagctctctccaactaccgcagcaatctggatctcaaacttaaccagcttattaacaaaaggaattccctgactgaacgcctgacggaaactgccatcaaggaacaggaaatcattccgcttatccgtgaacacaaggttaaggaagaactgtacctgatgctgttgagcaaggaacaggaaaacgccctggccatggcggtaacggaatccaatgcccgggtactggaaaccgcccatggctccaacctccctatctctcctaaaaccattaaatacgtcgccggaggaacggcaggcggagccctgctcagtatcctggccttcatgggagcggccatgttgaacaataaggtcaacaacaagcatgacctccccgctgcaaacaggcagccggtcattgccgaactgcctcaaatgagcaaaaaagaaagcaaaaacaccaagcttttcattcaggacgaacattccgtcatcgcggaatgcttccacattctgcgcaataacgtagattccatgctccccaggccggaacagggaggacacgtcattctggtcacctccaccctccccggagaagggaaaaccttcacctccgccaatctggccgccgctttcgcctatgccggcaaaaaagtactgcttattgacggggatttccgcaaatcctccctgacccggcgtctcggcggttccggacgcaaaggactcacttccatcctgctccaacagaccaccgacaccaccggcatcattcgccccctgggagaaaactcccgcggcatggatatcctttacaccggccccatggtgcccaatccggtcaccctgctcagccatcccctgttgggccatatcctcggcatcctgaaaaaacagtatgatgccgtcatcatcgacgctccgccctacggcattctggcagacaccgccattctggcatccctgagcgatattaccctgtacgccgtgcgcagcggaaaaatcgacaaacggtatctgctccaaatccagcaactggccgatcagggaaaactgcccaatatggcgtacatcatcaacggcgtcaacttcaagtccgccagctacagctactatggctatggctacggctaccagtatggctacgggaccaaagaaccgcagcaaaccagcaggaaacaagataaataaggcgcaggccatacataagcccaggctttcttccctgctttttactcttttcggcagcaatcatgttcggcaacctgttcaccccccggtatgcgacatccagcctttttccggacggcatggacatgcacacccatattctatggggggtggacgacggagccgcctgccttgaagaaagcctgggcatcattcgccggctcaaggccatgggactcaaaggagcttactgcaccccccatatcatggcgcgctacccggataatacgcccgatttcctgcgccgccgtttcgaccagctgcttgccgacaccagggaagaacaattccagcttcggctcgcggcggaatacatgctggacaaccagttccatgagcagctgcgccgatacactcccctgacctacgacggaatccacctgctggtggaactgccccagtactaccttcccggcgcctggaaggacatgatcagctccgttcgggacatgggatacgtccctgtcctggcgcaccctgaacgctatggccgcctcctgcaacaggaagatttcctccaactggcccggcaggaaggcgtcaaatatcagggcaatgtcggctccctgaaaggattttacggcaaatccgccgcagccctggcacaaacgttccgcacccgtcaactttacgaatggtgggggacagacagccacaacatcgccatggccaaacgcatgcctctgaaaaactaactccgcctaccctatcaacaacctctcgtactacacccatgtcagcccctataactaatatccccttcagcaacccgctgtatcgtaatcataatttttacagacgctacggaaaacgcgccctggatttcacgggtgcactcttcggccttatatgcctgtttccggtattagccattctggctattctgctggccatcgtccagcggacatctcccttcttcctgcaaaagcgcatcgggcacggcctcaaaccctttcatatcatcaaattcaaaaccatgaaagatacccgggacaaggaagggaacctgctcccggacgaagaacgcacaacagtcctgggctccctgctgcgcagcacctccctggacgaactgcctgaactcatcaacgttctgctgggggacatgagctttatcggcccacgcccctggattcccgatcaaatggccatttttaccccttccacccggaaaaaaagaatgtccctgcgcccgggcatcacggggctggcccagattcgcgggcgcaacaacctcaccttccgccagcgggtatgttatgacctgagctaccaacgccacctgacctttcggtacgacctgaatatccttttttacaccttcctcaaggttgtcgagagagaaggcattcaacagcgaccggatgccctgagcacaccggcccgtgtactgaagcccagggatttgatgacctacggattaaaagaaaatacgcaactcatcttaagaagtatccgaaaagaacccgtcccatccttgagcgtacccgaccatcccttgacccccaaagacctgccgaccaaaggccttagggcaaatacccagcttatcatgaggagccgtcagaaaagcgtccaataaaaatcctccactccccccgccaaaaatgaaaatttcagtcattacggtttgttataacagcattgcaacgctgcaagacacgctggaaagcattctgcggcaaacctacccggacgtggaaagcattgtggtggacggggccagcaaggatggaaccgtggaattgattgaaaaatacagtcatcaattttccggccgcatgaaatggctatccgagccggacaagggaatttatgatgccatgaacaaggggataggcatggccacgggagatgtcatcggctttctgaatgcggatgactattaccaggacgaaaatgtactggaagccatcgccgaagcgtttgcccggcatggaacggacgctgtgcacggcaatctgcactacatcaacggagcaagggaaatcgtacgcacatggcgcggaacggagtacactcccggttccttccagcgcggctggaacccggcgcaccccacgttctattgtaaaaaggactgctttacccgttacggcggctttgatcctgctataggcagcgcggcggactttgagctgatgatgcgctttatagaaaaaaacagcatttccaccgcctatatcgaccgcgacatggtattcatgcgcaccggaggctccagtacggcgggcctgagagccattctgaggaatacgcgccagaacaagcaggcattcaaaaaaaacggcatcccttacccgtggcattacggagtaacccggctactggccaaggctggcagtatgcgcaatcccatcctttacctgttcaaaacccgttaaattttctgttcccattcctttccgtcacgccgtcatgaacctgattttctattttgaccaacccatcctgccccatgcgggaggaacggaacgggcggcatatcttctggcgcaagccctgtcgcggcacggccaccgggtttccttcctgtctctccgtcaggcggatgttcctcccggcgaactgccttatttcaccctcccgcggcaggacacgctcttctgcagggaaaacagggaatatgtggaaaatctatgctccgcacaaaagacagacggccttatcaactgcggggccaatcaggatgactccttcttcttcagccatgaacaccttgacatccaggcttccatcatttcctggatttcctttgacgtccgcacagggctggattatttctcctgcctgctccggaaggatttctccacctggggcaataccatgaaaacgctgttgcgccatgcgctgctgccctgtaaaaaacatgtggccgtcagtaacaagaggaggaaatacagggatatgttccgcggatcggacaaggtggtctttctttccccccggtatacggaagacgccctccagctggcgggccccccggaaagggcccggctgtacgccattcccaacctgctgacttatgatcccgttcagcctgacctttccgggaaggaaaacgccgttctttatgtgggacggatggcggattctcccaaaaaggtggatcgtctgctgaacgtctggaaaaaagtgcagccgcttcatccggactggcatctgtacctggtgggggacggcccggaacgcggtaatctggagcggatggcggcgcgcctgaaactggaaaacgtccattttgagggtgttaaggaacccgcgccttattaccgcaaggccagaatactctgcctcacctccacccacgaaggcatgcccatggtaattaacgaagccctctcctacggctgttttcctgtagttttcaacagtttccacgctgctgaagacatgctgccgaaccgggagacgggacgtctcatcccgcccttcagcctgcgcctcttcgcgcgggaactggatgaactgatgagcggcccctacgtcccgccctgcaccaaagtattaacgaactatcacccggaaaaggtcattcccctgtggatggaatgcctgcaggaccagccatgagcaacatcgtcatctatcttcccaatgaacccctgggcaaacagggaggcatggaacgggccacccatcagctggccgccatgcttgccggtgaaggccaccgggtaacgctcctctgcagaaacaaaaacaggctgggggaagaatacgtgcctccgacggatctcgtgttcattcccgcagccctcagccggaaggaagaacagaatttcctgcttaaccttatccgggaaagagaaattgagagcatcattgaccagacggaaggcgggattgtggggcggtggggaatcttccgtcatcgcgggcacatgaacggggtttccgtcaaactcattgctgtgcagcatagttcccaatatacctatctgaaacattaccggaccgtcaaccggaggccctccggacgcggcctcatcggcaaggcacgttcatttttctatcatacgcttatactgtcattaaaaaaatacagggcagttttgcttcagcgcagcctgttccgggaactggcttcagactatgaccggatagtgacgctttcggaagggggcattgaagaattcaaaaaactgtgcccctccgtccccgggaacaagctcgtctgcattcccaatatcgtggaaccggccgttctctccaaggaagagagaaaagaaccgcgctgcctgtttgtcggcaggctggacaacccctcaaaaggagtggacaggcttctgcgcatatgggaaaaagtggaaaaaacatgtccggactggcatctggacattgtgggcgacggaccggatgcggagatgcttaaggattccgcccaaaaactggggctttcccgaattgcctttcacggcttccagaatccggaaccttactattccagagcctccgtattctgcatgacttccacgtttgaagggttcggccttgttcttgtggaagccatgcagcacgggtgcgttcctgttgcctttgacagctaccctgccgtccgggatattatctcccacggggaaaacggcatcctcgttcccccctttcaggaagaaatttactcgaacgccctcacatcccttatcaacaatcccggcgaactggaaaaattcagccggcacagcctcgtcacatccagaaacttcagctcctcaaacctggcggccaggtgggccgccattctgtagaatcaaaagaacttcatcaaaccatttgtaaaaatgaaaatttgttttgtcgcatggtctgatttcggaataggaggcgtcccaagagttctgacctgcctgatggatgccttgtcacgcaaacatgacgtaagcctctactccctgaaaaaccttccgcagtcaggcatccaaggaatcaaccgggaacaaattcacatttactgcagggaaatgaatttatatgagaaaattcgccgctccgcagcggacgttctcgtctgcaaaacccctctgttcagctccgcccttggctgccggctatacgcggccgcacgctacacgtcaggcttcaaaaaggcgctgacgaaccatctcaatgaacatcaatatgatgtggtcattttcggttccggctttgaagactccctgcttctcgccctcaccaaaaacaagctcctgcccagcatgagaatactgacatggtcccatgcttcctatgacaattatttcaccaatatgggctccttcttctcccggtacatgaaggaagccatcaaggcatattaccatcgtttcgatgaaatcatcgtcctttctgacggggacgaaaaagaattcagagaaaaacaccatctccccgcccgtcgaatctacaaccccaacacgataaacccggccagaaaatcgtcccttaccagcaaaacgttcgtttacgtcggggctctctcccaccagaaagggactgatctggccgtccgcgcgttccacaaattcattgaaacggatcaggaatggaatctccacatctatggggaaggcccgctgaaaggatggattgaagaatatgtatcctccaacggtttgcaccacagaatcattctgcacgggccctgcggaaatatggaggaagaatttccccgccattccatcctgcttttcccctcccgctgcgaaggcttcggactcgtccaggtggaagccatgtgctgcgggctgcctattctggcggcggatatacctatctgtcgggaaatagtgggcaaacatcaggccggcatcctttttgagtcggacaatccggaagacctgtgccgggccatgcgtgaaatgacggcctcagacctctcctcctatgcggcaaacggcctggccgcggcgcctctgttcaatctggagcagactgtatctgaatgggaaaacatgttcaacgcagtaaaatcatgaaacatttaacattactggaacctatcaggaaagaaggcaattaccaattcttcatgcaatggttcgcagacgcatgggcagccagcgggggaaaaacggtcaggggaattcgcgccccgtggaatttgcgtctgctgatcgccaaatcccgaatctcaaggaatttccccctgttcaccagctcacgcaaggcgttgctggttccgggggccggatacccggactcattcgcgtggccgttcggctataccaatgaaatcgtgcccatgctgtgggacgtctggccccggtactggccgcgcctcatctcttccctgaaacgccaccatgtgcaaacattgttgtgcacgtcatcccgggtctgcgaatacgtggctgaaaaacttccgcatattcacacggttcacgttccggaaggcatagaccccaccggctatagggacggaggagccctggaggggcgccggacggacattctccagatcgggcgcctgatgcagcctgtccacgaggccatccttcaaatgcggcaggaggcgccacatctcagctatctttacccggaagaaccgggccgccttgtcttcccggattttccttcgctgtgcgaagggctggcttccacaaaaatcgtcatttgctacccgcgctgccgaacccacccggaaatggcgggcgatgtggaaacgctgacgcagcgctactgggaatgcatgctctccggaacgctcatcgtcggccatgcccccaaagaactggttgatctgctggggtacaatcccgtcattgaactccagacagacggggacatcggcaaccggctctcccagattctggacaacatcgccacctatcaggaactggcggacaaaaacctggccgccgcccgggaaaacgcatcatgggagacaagaatgacccgtctccttccgcaattgcgccaactgggatatatgcagtaacaatctttttcagtttcactcagaaccagcaaatccggacatggccgcactctgcaaatactgggcttttgccttcattctctgccagcttggccagcagcacatgctcttaaacggcattggctccatggggtctttccttcttctggggctgggagctctgttgctgctgatcaactccggacgcgtatttgaccggaaaacggtcgcatcatctcctttcatttattctttcgtcttcattttcatcctgtatcaattcacattcggtatttttgaccttaatgagaaaacgggaatttacctgattgccaaggtcgtctgctgcctgatgattgcgctttccgtccagaaggacctgtcattctatttacagcgcctcatgccgattctgtcggtagtcaccagcctgctcatccttctcggctttgttcacaacgacgttatttttgagggccgccacaccctgggattctgcaacgcgaatgggctgggagccatctcctcattatgcgcaggagccatgattctggattcttccgaccgctcaaagaaaaaaatcgccatcattcttctatgcgtcctggccaccttcctctccggaagccgggcttccataggcatcctctgtttgaccttcgtcatcaaatacggtctgaacgccaaatttctggcagtactcctggccggagtgctcgcctggcaaatcatcctgcccatggcgggaatctcttccaccggcctgaaccggttcacggaatccgtggaaaatatggatttctcatcctcccgggaaggcgaacggaaagcgactctcatcatgatcgccgaatcccccatcctgggaaacggctttgacgtggaacagagcgaaaaagccaaggcggtaagcggcctggggtcccacaacggctatcttgacatcatgaaaatgataggcattccctactctgttttcctgtttgcgttcatggcgtattatacctgctccgtctggcggaaattccacaaatccgcctgcgattatgacaggatacacctgttcgtcatcatctccgttctaatcgccgccaactttgaatcatatctatggggaatcaaccaggtggtcaccaccctgttgttcacctccttcgccgtattgcaaaaacgcatgacagaccttaaacatggaatctgaaaaaacatatttctaccctgtcctctcggattatgacttcggctggttccgtttatcaggaccggggcttgccaactgcatgtttgtggcggctcgcgcctacatactcagcaggcgggaaaacgcaggctacatttcccccacctggaccaaactcagcccgggaacattcctgcgccaggagaaagataaaagagtttatttcaaaattttcaatgagctgggaatcagaggattaaaaaaaatccaactgctgcttgcggaaaaattgcgccccggttccgggagggtgaagcaaatccgcggcatgggggaatacttcgacgacctcaatgaacacatggatctggtgcatgaattcatagaaaaaatcaccagaaaggaaatcattgaaaacgtgcgtccggaagccttgaaggactgcatcgccattcacgtgcggctgggagactattctccggagatgcgggtggatatcctctggtacgtgaatctcgtcagggaaatcctgtccatcaagccggcccagcaattcctcatcttttccgacggctcggacgaagagcttcgggagctgctggccctccccaacgtcaggcgcgcgttttacggcaatgcctacgcggacatgtacgccatcagcaggtgcaaatgggtcattgcttcggactccacattctccgcctggggagcgttcataggggaacgccccatcctgttcaacaaaaggcatttcaagcgggtataccggaacagcgttccggaagccgtcctgggggacagcacctgccttccggatgaattcaagacgctgctttaactatgaacaagcaatatgacttcatctacctgaccaatacgccttccttttacaaagtaaggctttgtgaggaactggcgaaaaaacactccgttcttctggttctttacggctatggggcggaagcggtcaatacccggctctccggcaatgagggaggttttgactacttctttctgcatgagggaaatgcgggaaaaagaaacaaggctcttgtcctgctcaggctcctgaagctgatggcccaggtccgggcccgcagagtgctgttctccggctggatggcgccggaatacaacatatacagctttttttcccccaggcgccgcaatgccgtcatttgcgaatcgtcagccattgattccggcatgaacggctggaaaggcctgcttaaaaaagccgtcatacgccgcatgagcgcggcgctgccttccggttccccccaccgcgccctgtttgagcatattcgttatccgggagacatccatgtcacgggcagcgtaggcatctttaacatggaaggccgccgtgccctccgccattccccgtccactcccctgaactacatttacgtcgggcgtctcgcgccggaaaagaatctggaactgctcatcagggaattcaactccaatgggcggcctctgtccatcgtgggggacggccctcaaaaagaacttctcaaaaacatggccaaggataatatccgctttctgggccacgttcccaacgacagactcccggaaatatacggacggcatgacgtgttcatcctcccctcccgctatgagccgtgggggctggtcgtggaagaagccctcttccgggggctgcccgtcatcgccagcgacaaggtgggcagcgcggccgacatggttgccgctctggaaacgggcgccgtcttttccctgtccgcgccggacggcctgagcaacgccattcatgaagttgaaaagaattatgaaaccatggcgcgccgcgtcgcggacatcaactggaacagccgcgtggaaacgcagcttaaggcatacacctcccttttagattaatggctcccatattacaaaccatcgcgtcccttgactcccgttcgggcggcaccagcacctgcacttatgacctggtcaaagccctgaacgcttccggcatgcccacggacatcctcaccctccagcccggctccccacaagaacggatggtgggagaagacagctttatccatgcctgcccgtttgacgcccgcacccctctcgccgtctcccggaacatacgccgctttctggccggctcccggtactgcctctaccacaccaacggcctgtggctggacgtcaaccacgccacatgcgcgcacgcgcgcaaaatgaatgccccctgcgtcgtttccctgcacggaatgctgtacccccaggcgctggagcgcggcggctggaaaaagaaactcatgctcgccctgggacaccggaaagacatctctggagccgcctgcgtccacgtcacctgcgaaaaggaaatggaatactacagggacatgggcttttccaaccccgtggccgtcatccccaatccggtgcggatcccggaatatcttgcggatatcaggcgccccgggcacgagggcttccgggccggattcctgggcagactccatcccatcaaaaatctggaagccctgatcacgtcttggggtcagctgcgcctcccgaacgcggagcttctgctcatcggtgacggagacccggaatacaaggcccggctggaagaactggtccgggcggaaaacatttccaatatctccttcacgggctttgtttccggaaggcggaagtatgaaatgctctcttccctggacgtcctgtgcgcccccagccaccaggaaaactttggaatgagcattgcggaggccctgctggcgggaacgcccgtcatcgccagccggggaacgccgtgggaagcgctgaacacccgccggtgcggctggtggtgtggcaacgattcctcttccctggccgcagccctggaaaacgccttcaacctctccccgcaggaaaggctcgccatgggagaccgcggacgcgccctcgtcatggaaacctgcgccgccccccacgcggccgaccgcatgaaacgcctgtatcggtatctgctggggcaggaaaccaaaccggaatttgtctatctcccatgaacatcctctttttgctcggaaaattcccttccataggcggcgtggaaaccgtcaccgccattttggcgaatgaattctccgcccggggccatgcggttcatgtggtttcctttgaacaggtgacggaaaagccctccccagctctggacgaacgggtcacgctgcaccggctgagctaccccgtttccagccgggccaaccggaatgcgctgcgggacatcctggccacctgcggcattgacgtcatcatcaaccagtggtgcctgcccttccacgtcaccagactgtgccggaaagccatgaggggcctgccctgccgcctgctggccgtccaccataacgccccggactgcaacgcacggctggaaggcctcaggatgcgcatggcccggacgggaaacccggtgaacagagcgtttttgcgccttctgctgaaaggctgctcaatggccaccggggccagcctgcgttacgtttacgcccacagcgaccgttacatcctcctttcagacagtttccaccaggctttccggaacatcaccggactgaaagataccggaaaacttctgacgattcccaaccccattaccgtggaaaacccggaattccgctatgatccggccctcaagaaaaaggaggttctttttgtcggacggctggaacccaaccagaaacgggtctcccgcgtgctggaaacgtgggcgctgctggaaccctgcttcccggactggactctccgcctggtgggtgacgggccggaaaaacgctcccttcaggaattctgcgaggaacaccgcctgaagcacgtctcctttgaaggcttccaaaatcctgccccgtattacgaacaggcctccctgctctttttaacctcggaatatgaaggattcggcctggtaatcgtggaaggcatgtccttcggcgtctcccccattgtttacggaagcttcaccgccgcctatgacttggtggaccacggaaaggacggctgcatcctgcctgcggccggcggtttccaggcgcatcggatggcggaaatggccgcagggctgatgcgggaaccggccgccctgcgctccatggcgaggaacgccatagccaaaagccggaaattcacgcgggaacacatcattccccagtgggaaaacgccttccgcccagacgcctcctgaacacgccttccccctttctctctacatggaacagccccggaaacaaacggacatcgcattaaccatcagcggaaggcttgccgcatcctgcgctgtgacctatatggcgctccctaccctcctctttctgctgggatgggtcaggcccctgttttccattccggccgctgcggcagtagccgccgcctccgtcctgctgagcgcaacaatcccggcccccacgcttcacctgaccaggcggcagctggccatttacctctgtgccttcgccctttccctcctgtggcttctggcgggcggaatgacggggatcacatcccagcacgcggactttgtggtccgcaaccccatttatgaaaccctcatccgttgcgactggccgctggtggacgcgggagacagccatttcatttactacctcgccttctggctgccaccggctctggcgtgcaaatgtttctcctgttcggacatattcatcattaactatgtcctgaccgcctggacggggctgggcctggcgctgacccttacggtcctctggagcagattccgctcggccaccctgctcttcctgctcctgctcatcttccagggcccgctggacggcatcgtcaggtgggggcttcatttgctcaatttgcaggggcccctggcccacgaactctacctgacggtactggctttcttcggaggcgtgccccccaccatgcagcttcattacacctttcatcacaccacgctgctgtggctgttcctggccatggcggtctcctggaacattccgcccaaataccagctcttcctggcctccctgtgcctgctcgcctctcccatcggctcgctgggccttctggtcttcatcgccgtccgcacgctggtccaccgtactcccgtcaggcaatacttctcctcctggacggtgctggcgggcgccgcgctggtgctgctggccggcatctattttacaagcagcaacggaaacaaccgcatacgcctgacgtggcaggactccccctttgacctgctccagtacggcaactggaaattctggggcgccatggccggctcctggttgctgacggtcggcgttccggcggctcttctgttccgccgcttcaaaaaagacgccctgttctggtcagccctggtcattctcacgctcacctacttcatttacataggttccgtgggcggctacaatgaattctgctacaaggcctccagcgtcagcttcttctgcctggctctcctattcacccgcatcttcacggaacgggtgggaacgccccggtggcgcaaactgtgcgtctgttatctgctcctggccgcacttcccagcctctccgtcttcgccaaagccgcacccacgctcgccttgacgaagtccgcgcggctcgccaacatgcagcgggaatggaaggggcatctccaccatccggaacatccctggaacgcgcccctttggggagccggagaaagcggagccttccggaacatctatttccagaaggcgggccaatccgcggaagggccgctggccgccttttccaccggaataaaaacagacgcggaaccagccgccgtaccccggccataacccctcttttaccactcacccccatccccagccatggatctttcccgttaccaggaacactactccctcagccaccgcctcaaacggtatggctggtacatcgtcaaccggacgctcttccggctcatggtcaccaacgccatgaaagtcccccggaacctgctgctccgcctgttcggggcaaacataccgcttgcctccctcgtttaccccagcagcaatatctgggcgccatggaatctctccgtaggggaatacgcctgcatcggccctgatacggaaatttacaacaaggcccccatctccatcggaaaccacgccgtcatttcccagggggccttcctctgcacggcctcccatgacatctcggatcccgcccacgcccttatctccgcccccattaccgtggaagaccaggcatgggtggcggcgcaggcctttgtgggcatgggggtgacggttggccggggagccgtggtaggagcccgcagcgccgtattcagggatgtggccccctggacggttgtgggcgggaacccggcccgattcatcaaacaacgcacgctccgctaaaccatgcttgacctctccgttatcatcctcgccagaaatgaggaactccatatccgccgctgtctggaaaacattcttcccgtcgttaaagaagtctttgtcattgactgtttttccacagacaacaccgccgccatctgccgggaataccccagggtgcaggtcatccagcatgaatggcccggcctgtacgccctccagttcaactgggctctggacaactgccccatcaccgcagaatgggtgctgaggctggatgcggacgaatggttcatgccggaagccctggaagaactgaaggcaaaactgcccgcccttcccccggacgtcaccggaatcatccacaagcgcaggcatattttcctgggccggtggatgaagcacggcgtttacccggtcaagctgctgcgcctgttccgctacggcgcggccagatgcgaacagcgccatatggacgaacacatggaactcagccggggccgctccgttgaattcgaatatgacttcgtggatgaaaacctgaatgacctgggctggtgggcacataagcacgtggactattcctcccgggaagcggcggatattgaagacatcctctcctcctccgcggcggcctccggcatcgacggccaggcaggcagaaaacgcgccatgaaagaacgctacgcccgccagccgctcttctggcgttccttcgcctacttctgctaccgttacttcctgaaactgggttttctggatggcagggaaggatttttatggcatttcatgcagggatggtggtacaggaccctcgtggatgcccggcaattcgagaaacagaaaaaaggctccgccaacacggaacgctgacccccattaccccgctttatctccatgtccccgcttttttccatcatcgtccccgtttaccgttccggccctttcctcagggactgcctggactccatcaggaaccagaccctgacggactgggaatgcatctgcatcaatgacggctccccggacgacagcggagccattctggacgaatacgcccggaaggacgcccgtttcaccgccatccaccaggaaaaccggggcgtaagcgccgcgcgcaatgcggggctttccctggcgaggggaaactggaccgcctttgtggacggggacgataccgtggagccggacatgctggcctgcctccatgaggaaactctccgcgcgcaggaagccgccctcctctgctacggaatcagcaaggacttccatgcgggttcccggctcatccgtacggaaaccaccctcccaagccggaaccagcacatccccgcgggggaaacgggggctttcctgcgctacctgctgaccagcctggacatggaatcctcctgcaacaaattgttccgcacggaactcctgaaaaaaaacggcctcctcttcaacacctccgccgtcgtgtttgaagacttccagtttgtcctggactacctttccgcctgcgccccggacatcatcctgctcaaaaaagccttctaccattaccgcgcgcaggaaacggaaaacggagcggccaagcgcagccgcttcaatctcgtccgggacatagacacgctcacaaccaaattcctggcctggatcagcaccctttcccttccgcaggaagatattcccattgtcaaaggctacatcctgcaaaaaatcagcgtgattttccatgccctccagcggcagccctatgccgcgcgcaaggaagtattccgggacttccttaccagcggcctggccgcacgcaaggcggagcttcccctgtgcggctgctacttccaccttgtctgccgtctgctggcggcgcaccggtaccggctggcccaccttctgctgaagacaaggaacatttaactctctgcgcatcctcatccaaacggcatcgccaacacccagcctttcaacaatatgacccagcctcttgtcagcatcgtcattccggtgttcaatgtggaacaccatctgcgccaatgcctagattccgttctccgccagaccctgaaagaatgggaatgcatttgtgtagatgacggatcgccggacggcagcggagccattctggatgaatacggaggcagggacgcgcgtttcaaaatcatccaccagcggaaccaaggcgtttccgccgcgcgtaatctgggcatagagctggcctccgccccttatttgacattcattgactcggacgactggattgaggacgatgcgctggaaaacctcctttccgccatggagaagtccagcgccgatatggtgatgtgttccatctgtatccatcagaaaaatcatcaggaggtttccatggaaacgccttaccctccctccggaaacatgagggacgaatacgtggtgactaatgaatccttttccggggcgaatctggtagatgtctccatctgggcgaaacttttcagcatggaaacgatccgcacccatcaaatccgctttacgccggaactcaaggtttccgaagatatggaatttgccacgcggatgctctgccgcagcagatgcgtctccatcatccgaaaacctctgtaccattaccgtgccggccacgagagcagcattatgaacaacattgtccgcggaagaatgaaaacgtcggatttcatcaattccatcaatgccatctatcgcctctaccagtgcgtcccctccggtctggaacgcggggaatgcagggaacgcattacaggcacactgagaagggctctttccggaaaaaacttctaccggcaaatcatccggcagcttgaacacaaagatcaatccgctatcgaagcctcaacctccttcccttacatgaattacctgaggagggggaaaaagcttgtttctcttcagatgatcttacgacacctcagaatgcagttcggcttcggaacccgtcttcaggctctctcaaccgctatcaggaacttttttaaaagctgacgcccatgaagataggcattatcaccatccattattcgttcatcacctgcaactacggctccctgatgcagttatatgccatgcagcaggtactggcggggatgtccgtccaatccgctctggtcaagcagctccccaggccgctccccgtcccccccccgcctactgcacggcaaaaactgaattattactgccggcatccttggagttttctttcccgctgcgcccgttccctgaaaccggagcgcagggttccccggaaaactccgtcatttgaatcctttattgaacaggagatacacgccctgtcccccattttccttcccggagaactcaacgcgcaagaactggattttgacgcatacctggcgggcagcgaccagatatggacatcctgcgaaccggaaaaactcctggatttcgcccctgccggcaagcgcatagcctatgcagccagcgcggcatgggggaagcagcccccggaatggtatgctctggctcagcgggaattccctaaattctccgccatttccgtccgggaaaaacacggggtggaaatatgccggaaagctggcgcagaaacagttgaagttgttttggatcccacactgctcctggaccgcagggaatactcccggctgacggaagggcggccgccgtacttttccgaaccgtgcgttctggggtattttctcaacatcgaccagctttcccagcttccctggaagcaggtgaaagaagccgggaaaaaaatgagcgctccgctccgcatcattcctctccagggagcggaatgctgcatcccggaaaaatattccatctccccgaatccttatgaatttttgcagtccttccaggaagccctctgcatcatcaccaattccttccatgggacagtattcgcgcttatcatgcgcaagccctttataactattcttcaaaaaggagaaacagccgtccagaacacgcgtattttctccctgctggaatccctgggtctggaagacaggatctaccatccggaaaaaggctccatggccggacaactgaaccgtcccattaactggacggccgtcgaacggaactgggaggctctgcgtattcattccatggagtttctaaaaaacgccattcaacaatgtacctccgctacccgtcatggctgaagaaaacagcaataagcgcattgcccgcaacaccatgctgctttacacccgttcgctgatcaatctggtcatcgggctgtacacgtcgcgccttaccctggacgcgctgggaatagcggattacgggatttacaacgtcgtcggcagtctggtggctcttttcggactgttcaacggcagcctgaacacggccatcagccggttcatcacctatgaactgggaaggaacaataaccaaaggctgaacaaggttttttcttcttccctgagcatcctctttatttttgccctggtgatattcatactgggggaaaccgtgggactgtgggccatcaactaccatatggtttttcccgtggaccgaatgaatgccgtcaactgggtctatcagatttccctgatgacattcctggtaagcctgctcaacgtggcgtacaccgcaacgctgacagcgcatgaaaatttccgggtgctggcgacagtagaaatcctgttgacaggaatcaaagtaatatgtgtcatcctgctttattacgctcctatggacaggctgatttattttgcctggtacaatttcctgcttacactggcttcaagcggcttttatgccctttactgcagcaggcattactccagctgccgctaccgggccattctggacaagccttttctcaaggaaatgggagcattttattcgtggaaccttttcggttccatcgcctggctgctgaagggggccggcatcaatgtggtcatcaacctttttttcggcgtactcatcaatgccgctcaggccgtggcgtcccaggtctcatccggagtaacctccctgatggggagtttttccagcgccatgcagccgcaaatcacgaaaagctacgcggcgggagactacgaacacatgtggaagctggtattcaacggaacgcgctacagcttctttcttctggccgtcttcatgcttcccctgtgcttcaatattgatttcatcctctctctctggctcaaggaaatccccgcatacaccaatatctttgtgattcttctcctggctaacgtgctggcggaaagctactccacctatttgatcaccgttctcctggctacagggaaaatcgccttttaccaggccagcgtgggaacaatcctcctgttgaatgtcccgttaagctatctggtctttcaatgggggggccctcccgtttctttcctggtcgtctccattgtcctgaccatcatggcgctgatcatgaggctctggcttctgaaaaaaatgctccgcttttccgtactttcctttcttaaacaggtggttctcaaaacagtttccgtcagcctgctgatctgccttgtcaactgcaccatttatctgctgttgcctgacatgtatggaaaacgcattatttttcttttttcaacgtctctcttgtccatccttctcacttatctgacaggattgaataatcaagaaaaaaacattgatttttcaacagcttaaaaaaagaattaccttccttatttcctgatttaaaaactttcccgttaaccgcaatccatcatccatgaatatgttgaacctcctgaaaaaaatctccaatcggctcaatttcatattttatacacactccagccgctataaattgaggtatctttattcctacgatcggaaaaggttcatccgccatgcaggatcccttcaccatgaggagaaggaacaaaaactggcctctgtcatcatggcctaccatgtagtagaaaaaggattaagcatgcctgagaggcgtctggggttcggccatgatgccgtcttggaactcatcagtctgataagggattattcagaaaagttccctcaaaatgatcaaatcctgcatgccatctccgtcttggacgcttaccgcgaaatgcacagaaaagaaaacttcagcctccgtccggatctccagcaggcgctggacagcctgctggcggacttcccccctgcggtcaaggaagacggtcagatagaaataaccagggaactatattatgcccatttggaatcctcctttcccgaattttcggcatcccgccattccgtgcgtcacttcaatggcccggtttcactggaacaaatagaacgggccgtatcccttgcccgcaatgccccatccgcctgcaacaggcagcatacccgcgtccattgcatctgtgataaggaaacgcggaaaaaagtgctctccctccagaatggaaacaggggattcggtcatttggccgacaagctgctcatcattacggcggatctccacgacatccgctgggaggaagaacggaacgacctgtacactaatgcaggaattttcctgatgaacctttgttatgccctgcacgccaacaaagtggcgcattgcctcctgaactggtcagtatcccctttccgggatatcctgttaaggaagctggtttccattcccgaccatgaaaccgtcatttgcattcttgcctgcggcgattgcccggaacagttttctttagcgtcctcgcctcgcaaacctgtcagcgagatattaaccgtacaccgttaatttcgtctgtgttcacagcatacaattccctctatccggttacgctgtaattttcatttacggaattgtttactccagttttgctttgttttattgattttccctgctttttcatctgagcaatttgttgaatattaaaagccagaatcttttgagaatcttacagcaaggctattccgcataattccgttcatttatctgcaattctgattaatatgaagcaaatcacttcactcagaggcctcgcgattattctgatcatccttttccacctcaatccggaacatttcccctacggctacttcggcgttgaagtgtttctggtgatttccggctacctgctcatgaaatccctccagaaacagcagatgcaaatccgtctcggggaatttgcccgtaaaaaagtcttaagactttttaccccggttgccgtcatcgtcccgctcactcttctggctggcatgttccttctggactatacggacctggcgacagccagttccacaggcggatatacgctgataggcgccgcgaacaggttcctggccgtcatccagtccgactatttcgcgcaggattcttccggcaatccgttccttcacatgtggtacctggcggtgacggcacagatttatcttttgttcgcggggggatgcgtcctgtaccgttaccttcccaaacgggcggtcgcctctcttttctggatcgccggcatcgggtcctttctctgggcctattcctatcccattcacaacctgttgcaggaaatcggcctgcccgtctgggagcaggtccgccccacctcccattacatgacgctgccccgtttgtgggaggtttgcgcagggattttgttagcaatataccccccccctttaagttcaacacgttgcgaaaacagcaaaaaaaacgctctcctcttcctccttggaatgttatgcatcctcgtacctgccctttcccgcggaaaggacgtctccctctgctcggcggccgtagttttggggacatgcctggtgatccggtatgcggaatccggcaggctggcccactggttcaacaataaacttctgctgtggattggaggaatctcgttctccctttacctggtgcatatgcccctcatcgcgttctatcattcgtggtttctccatgcccccggatggcccggaatgcttgccatcggagcggcgtccgcagtcctgggaggtctcctgtaccttacagtagagaaaaagcgcatgaagatgaaatggtttatccccctgtaccttttcgcgttgcttctatgcgttgcaggaaggcagacggaaggattccggaactacatcaaccaggaaatcaactccatttccagcccccagctgcatggcgcatcggaaatcaaatctcctgaagccgcccggggatttgataaggaagccatcaaattcaataacaacatctttgccttcgtcagcagagccgatttcaagggaagtgcggaacccggcctgctgcagctgggttcccctgccgaagctccatccatagtcctgctgggggacagccacgcctctgcggccttttgcggattggacgtagcatgcagggaattggatatctccgggatttacgtttcttccgtcatttccccattctggaacagggagttgcccgcgctgccgtttgatgcaagctactattgcgacgagaaaaaaataaaggccctcatggcatggctgaacgtccacccggaaatcagccatgtggtgatagcccagcactggagcgcccgttacgacagtaaaaatgtaatggactggaagctgaagccgcttccctccggcgaacctgcctattcaaactccctccgtgcatttatctccgaactgcgggcgatgggcaagcaagtcatcctgctggcccccactccgctcatcaagcaaaatgacgtggccaaatacatcaggaacctcatacgcagggtggaaacgggaaaaggcctggaaagccttacctgcacgcggcaaaaatacagggaagatcatgccgccgtgcttcccatccttgaccgtcttgaacaggaagggctctgcaccgtcctgcgcatacttccctatataccggaagacaggccgttcaacgcctatgaacacggggaaattctgtacaaggatagcgaccacatgtccagcaaaggctccatcaaactcttccagcacctgaaaccccagttaaaggaagcgctacaaaaagaatccacggcatcatcaggtttacaaaagccatagccgtgaacacgtctgccgcagctccggcggggaaacatttaaataaaaccggcttttgtggaagctatagagttttctttggaaaaaaaatgcccttgcatgatgaataatgcgccaaatgtttaatactttttgtcatacattgaacatatctttccgtttcttttctggtattgaagatacacttgctaaaaataaaaatattgttattatatttttcccctctaattatgcaacataaaaccattattgctacatgtgcggccatggccgctttttccggcatggctactgccgatatccagcttcccctggatgttttaaacgccaataacggcggcaagacattctccgcccagctgggagcaggctacgctaccaaatacatcagccgcggtctggctttccagaattccgcaagtgatcatgtcattcccttggaagccgtcggcgcctatcaattgaacaatcaatattccctgataggcggattaaaatatcagtggctgacggataatggtctggaacacaatgattccggcatttgcgacgaaggctcggccattttaggcgtcagccgcaaattcggaaaatccactgtcgcggctctgagttaccagtttgtccacggcggtatccccggaagtttcaacatccacaatacaggcaacaactccggcttccctgctttcagccacaataggccggaagaacacagcttcgttctggacattcaccatgacttcggcaaagggctggaaaacttcttctgggactgccgcgtacaatatacgttccgctggatgactggctggtggttcaccaatactctggggtacaagtatgacgtcaacaaatccacctccgtcatcgtggcgggcacctggaacgccactgctggctattttgacagcaattccctgaacgccaatggaacccagggcatttccctgacggtttccgcccctgtcaaggccacgaaagacctgaccgtgactccgttcgtgggtacggtctggctcggcaacggcggcctggcggccaaccaccgcggcgcttccgcccgtttcccctacagggagccctccaaggtttaccgcaatttcaccttcgtcgccggggtaggagttgcctacaccttctaacaatctgactgtcattcactcaaccaacgcaagctccggcatgtgccatcaatcatgccggagcttttcttaactccccatgcccctgtccgccgttttccacacttcctcccttcagaagcaagtggccgccctgagcgacgcattcgccatcgcaggagaattcctccattgcgacgtcattaacagcggccatatcaacatgaccttccgggccacctacaggaagccggacggcaccacccgccgctacatcttccagcgcgtgaacgatgccgtgttcccatgccccaaggatgtcatgcacaacgtggaaaaggtaaccaaccacatccgctggaaaatgctccgggtgctgaaaacgcccttccgccagacgctgaacctgtactccgcgcggggcggccgcaaatacctggaaattcccggttccggcttctggcgctgctacaactgcatagaaaacacccacacgttcgacgtggcggaccatccccgccaggcttacgaagcagcccgcgctttcggcgctttccagcagctcctgtgtgacatgaatccggaggacatccatgaaaccattccgttcttccaccatactcgcaggcgctttgaccatttggaaaaagccgcggcagcagactcccacggacggctgaatacctgccgcaaggagctggacttcatccgccgccgtgaacgttatgtggacgtgctgctggatctccaggaacggggggagctccccgtcagaatcgtccacaacgacacgaaaatcaacaacgtgatgctggacagggagacggacaaggctgtctgcgtcattgacctggacaccgtcatgcccgggagcgtcctgtacgatttcggagacatggtgcgcaccatgacctcccctgcagcggaagatgaagaaaatctggataaaaccttcctgcgcatgcccatgttcgaggccgtcgtcaagggatacctggaggcctccagagaattcatcacgccgcaggaagtctccaaacttgctttttccggtctgcttatcacgctggaaacgggaatccgcttcctgacggactacctggaaggggacgtttatttcaaaacgaaaaaagaacggcacaacctgcaccgtgcccgcacccagctcaggctggtggaaagcatggaagagcaaatgcccgaaatggaagaatgcgtccggaaatgcttccagactgttaacggctgagagggcatgaacggcattaccccaattttatgatagtaccggaacgcgggctggtgctatactgcggggcatgttaaaaaatatttctcccctcatcagcccctccctgctgaaaattcttgcggaaatggggcatggcgacgaaatcgtcttttcagacgcccacttccccggccataccttcaaccctacggtgctgagggcggacggcctgggggcggatgccctgctggcagccgtcattcccctcttcgaactggatgcctacgcaacgcccgtcatcatgatggccccggttccgggggactctctggaccctgcggtggaagccaaataccgcaaggcgctgaactatgacggggaaattgagcaaatggagcgctacgctttttatgaacggtccaaaaaggcctatgccgtcgtcattaccggggaaacggccaaatacggcaacatcatcctgaaaaaaggcgttacccctctttcctgaccattggccgccagacagaccttccatgcagtacgattttgacgaagtaattgagcgccgcggcaccggagccctgaaatatgaagcgctgcttccccgctggggccgggacgacctgattcccctgtgggtggcagacatggacttcaggacgccccccttcatcatggaagctatccgccgccgctgcgagcacgaaatcctgggatataccgtcaagccccgccctttctttgaagccatcagggactgggtggaccgacgccacgggtggaaggtgaacgcctcggaaataggcttcgctccgggcattgttcccggcatttccagcgccatccaatgctttacggaaccgggggacaaaatcatgatccagcctccggtgtaccacccctttgccatgatcatccgggaaaacggccggaaaatcgtcaacaatcccctcattctggaaaacggccgctaccgcatggacttcaaccacatgaaggaagccgtgcgcggctgccgcatgttcatcctgtgcaatccccacaaccccggaggccgcgtatggagtccggaggaattgcgccgcgtggctgaaatctgtacggcaaacggcacgctggtcgtttctgatgaaatccatgcggatctgacccttcccggccacaggcacaccgtattcgccactgtttccgaacaggcccgcatgaactccgtcacctacatggcgcccagcaagaccttcaacgtgcccggcctgggcagttcctacgtgatttgccagaatccggacctgttcgcgaaataccaggactttgtcagcggcagagagcttgcggaagggcacgttttcgcgtacgacgggcttatcagcgcctattcaggcccggaaggggaggaatggctggcccaggcgctggactacattcaggaaaacatccgcttcattgacgcggaactgcgccgccgcatgccaaaaatcaaggccatcatgccggatgcctcctacctggtatttctggactgccgggaaatgaacctttcccagaaggaactggtggaattttttgtggacggagcgcgcctggctctcaacgacggttccatcttcggcaaggaaggggaaggcttcatgcgcctgaacgcgggctgtccccgctccattctggaacgggcgctcagccagctggaggaagcctatgaaaaccacggcttccggcaacaacaatcacaaaattaaagacacgcatcacgctccccggcaatggaattcatttccggaaccatgtattggggaaattttcccggagacatccagccccgctggattttctcctgttgagccccttgcggagaaggctgcggcgcggtggaaagggaatatccgcacaaccccttccgccgtttcgcccgcggcaaccccttactctcccattccatgcagaaaaacacgcccgggatgccgccatgactttgcttgcaaaacggcaggaaaggagtatcgtcccccgcatgtactatatcaccacggccattgactacaccaacggaccgccccacatcgggcacgcttatgaaaaagtcctggcggacgtcctcgcgcgctggcaccggatgaagggggaggaagtctatttcctgaccggggtggaccagcatgggcagaaagtgcagcagacggcggaaaagctgggcattacgccgcaggagcatgtcaacaatatcacggggcaattcctggcgttgtgggaccgactgggcatcagcaatgacggatgggcctccacgacggatccgcgccacaaggcctgcgtgcagaaaatcctgacggacctgaaggacaaggggcagctttacaaaaaatcctacaagggattctactccgtgcgccaggaacagttcctgacggacaaggaacgggacgcggaaggcaacttcggcccggaatggggggaagtggtggaactggaggaagaaaactggtatttccgcctgaccgaccatgtggaatggatgaagcaattcgtggaaaagagcagtgattttgtccttccgtccttccgcaaggcggaagtgctcaacgccattgactttgactcggacctctgcatttcccgccccaagagccgcctttcctggggaatcgaattcccgttcgaccccgaattcgtcacctacgtctggtttgacgccctgatcaactacatttccttcgccggctacctggcggagccggacagcggcctgccggaattctccaaactctggcccgcagactgcgaagtcatcggcaaagacatcctggtgcctgcccacggcgtgtactggcccgccatgctgcatgccatgggcttttccgacgaggaaatgcccaccctgctcgtgcacggctggtggaacatcaacggagaaaaaatgtccaagtccatcggcaacgtggtggaccccaacctgctggcggaacaattcggcccggaacccgtgcgctattacctggtgcgggacatcaccaccgggaaggacgccaactttgacgcggaccgcctggtcatgctgtacaatacggagctggccaacgacctcggcaacctgtgcaaccgctccatcaacatgacgcgccgctattgcgactccgttatctccggagcggaggcatatgatgacgaagcctccaaagccctgcgctccaccatggaccaggccgtcaccctgttttccaaatacatggacgacaacatggcctccgatgccctggcggccctgaacgcccaggtttccgcctgtaacgcgtacattgagcagcagcagccctggcagctggccaaggatgaagcctccgccccgcgcctccgctgcgtgctgcgccatttgctggaatgctgcgcccaaacgggctatctcatcggctgcgtcctccctgacgcctccgcccgcattctgggccagctcaacgccggggatctgttccggggccttacgccggccgcgctggagtggggaatcctccccgcaaggcaccgcatcaatgaccctgcccccgtttttccccgcattctttcggaagaggaaaaggccaaactggctgaaaaagcggccagggcggcaaaaaaacaaggctgattcccgtgaattcccccgcatccttcgtcaaatccctgctggcccaatgctgcctgggcggcatttgcgagtgggtggtctgccccggcgcgcgcaacatggcgctgctccaggtgctggctgccgcggaggatctggtgaaatggactcactttgacgaacggtccgccgccttctttgcgctgggccgcattcaggatatggggctgcccgtggccgtggtcactacctccggaacggcggcggcggaactgctccccgccgtggtggaggcctactaccagcgccgccccctgctcctgctcacggcggaccgtccggcggcctgccggggttccgccgctccccaggccatcgaacaggcggatctgttcggcatttacgcacccacgattgacctggaaacgccggaaagcctgccggaagacattctgcaagactgggattacgcctcacccctccatatcaacgtgtgcctgccggatccggaccctgcctggaaccccggcagctgcgacctttacccggcggaacctccggaggaaaacggattccggggctccctggcagaactggcccgggccctgcgcttcaaatcgcgcggcgggctggtggtcatgatcggcggcctggaccccacggaacaagccccggcccggtggctggccaacgaactgaaagcccccgtggtggcggacgccacctccggactccgggaagagctggcccatctggctctgacggacgcagacgccctgctgagggaacacccgcccgccgtcctgctcagattaggggacgtgcccgtggcccgcttctggcgcgacctggaggacattccagccacggaagtcttctccgtcacccgcaccggcttctccgggctggcccgcccctcctccgtcgtaaccggagacctggaagccattctgcatgcgctgggggatatagataccgtgggcgacgtcaacggcctgcgcgccatgaacaaacgcaggaaagccctgatggaggaactgctcatcacctgcccggaaagcgaacaggccatggtgcgctccttctcctgctttgccgcggacggagactgcatttacctgggcaactccatgcccgtgcggtactggaacagcttcgcccagacgtccatccccacggaaaacgtccgcgccaaccggggcgccaacggcattgacgggcaaatctccggttttctgggggtctccgcccggtgttcccgctcctgggctctcgtgggcgacctgaccgccatgtatgattccaatgccctggcactccttccccaactggacagggggacccgcatcctcggcgtcatcaacaacggcggagggggcatcttccgtgccctcccgggagcagacggccatccggaaaccatgaggaagctgcttgtacaaccccacgcccattccttcaaagccattgcggaacaatggggaatgcgctacctgaccatccgcacggcggaggacttcgaccagcttgattccctggaggcaaacagccagacgcttgtagagctcatcccggacagggagcagacggaacagatccgcctccggctggccaacgcccaagtgtaaacatgccttcaccaaaaacgaaaggaagccggccttttgcccggccatatcctgcgattccttccaaatggattgaaaatgccagataaaaataacatttcctgcatctaaccatagggaaatttctttcttgccagacgaagggaagagactacattaacggcgattcatgaaaaatgaatctccattgggacgacggcgggagctgtcaggaaatagatggggaatccggttagaatccggagcagttccgctactgtaattcttccacaggaagataagccagaataccagcctgatggatgcctatgcatatggcgggaaaccatttgatagaccatgttcaccagaatcatatccgctttggataaggagcgccccattcacggcgtcctctgttatttccggttccatgtctcaaccggactttcctgtttccggtatccccctgaatgaatggaaccttcccatccggcggtctcgcaaccgccaatggcaagccttttttctggaaaccggtgcatgggctgtgcgtcaacacaaagtccatacgaaacatgatgagtaaaaaacaactgctattactgctgccggccctgtttgcggccatttcaacccttcctgcaaatgcggcccacatccttacgggaggaggaaccggagctgtaaatgccagcggtacaggcatctccatgcaactgaaccagggctttacttctgatactgccctgcccggagccgtgaacctcgactccatacagctcaagctgacggacaaccggtttaccgcggacttcacatccggcagccttaccatggtggtattcaccaaaccggcgtcggacagcgcggactggacggtcgtcgggcaatccagcacggaagaaaacctctccgtgaatatcggctcctacaccgacgtcgaatttaccttcagcaacctccttctgaacacatcgcaggaatacgtcttcgccttcgtttctgacgccgccatgctgggcaggctgacaataggcacgagccttcaggcggaagagggagctgactccccattcagcgtagacaacggatttgcctacgcctccatgcagtcaacagccttttacagcggggctcccgtcatactctactacaatacgggcaacgaaacgagcatgtacttcccgaacatgatcgttaccgtcaccgaccccgaaagcgtccccgaaccggcttcatgcctgcttgtcacgctgtcgtgcgtaggcctgctcgtctcacgcagaagaagataacctcgaaccgccaaactactggaatatccggtacggctacggccttctgcgattttcccaactgcctttcgcgcggagggaaaagccgtaccgggtcattgggcattccgcccatcccccaacgcaggctcaggaccttcacctggcagaactggttgccccagccgtcttccgaacctcgacctcccttgcatagggctgcaaaccggtacggaacttcagaccccggtgttccttatcatgtgggcacagcgtactttttcattcactctcgcggcattcaagcgcggttgaaaaaacaggatttctttctgtccagaactccaacccggcatgccagcagggaagagccgtggccggacttatcgtaaaacaggtatcagaattccaccttctccacatcctcattaatttgcagaaaaggatgttctccgccggatcacggtcgcaatcctccaacttccggggaacggcctcctcccaccgttctcccggcattttttcccatcggcagaaagtccgccgggactgcggaaaccgcccaggcaaatgatgcacaaacaaccaaagccgcatgcaacagggcagtgccatgaaacagcatgtccgccttaatattcatacggcaggaagcaccgggccgccctcctcttttttccgcctccagaggcatttgacgcagtctcccccccttgccattaaatacgttcctgcacggcatgaaaaaaaccgggcagaacatcacgtccacccggtttttacagccgtccggcacaaacgccggaggcatgaggttgccggccttccgccggaaaccagttaaagatagctgcgcaccacgcaggagacgcgttcacgagccgcggcaatgcgcttgcgcaattccagcgtgtaggcttccatatcccggatgggggactgggccactccggaaatcatggccgcctgggctaccgccgggcactcccattcaataatgcggggatcaatgggcttgggaatcacgtagtcgatgccgaagctgagcggggctcccccgtaaaggtcaatcacttcctgggggacgggctccttcgccagatcggccagggcgcgggcggcggcaatcttcatctgttcattgatgacggaagcgcgcacatccagggcggcacggaaaataaaggggaaacaggaaacattgttcacctggttgggccagtcggaacggccggaccccataatgcagtcaggccgcgcttttttagcatcctgatacgtaatttccgggtccggattcgcacaggcgaaaatgatgggggaaggagccatgagcttcaccatgtcctgcgtgagcagtcccttggtagacagccccaggaacacgtccgctccggtaagggcctcctccaaggagcagtcttccgactgggagaactgcgctttcgtagcatgaagatcaatgcgtccggtatgaatcagccccttggaatcaaacatgtagatatgttcgcggcgcacccctagcgtcatgtagaacttggcgcaggaaatgccggcagcgccggctcccacgacgacaaccttcatatcctccagcttgcggcccgtcaactccgcggcgttcagcagggcggcgccggaaatcacggccgtgccatgctggtcgtcatgaaacacgggaatattcatctcctcccgcaggcgttcttccaccatgaagcattccggagccttgatgtcctccagattgatggcgccgaaagtgggttccatggtcttgatcgtctcaatcagcttttccggttccttcacgttcagctcaatgtcaaaaacgtcaatatccgcgaacaccttgaacagaacgcccttgccctccatcaccggcttggaggcatccggaccgatattgcccagtcccagaacggcggtgccgttggtgattacgcccaccagattggagcgaccagtgtacagggcgctttgagaaggatcctctttaatgcggaggcagggctcggccacgcccggggaataggcaagagtcagatcccgttgtgaaaagcagggcttgcagggcagcgtttccaccttgccggggcggggctgggaatggtactgcaaggcatctaatctaatatcggaactcatgattgtaatggaaaaacagaaaatcgagccttgcttgcaccacagaacagacatgcattcaagtaaataatcaattaattgcgtcacacgctccggaaaaggaaaacctctttttacattgatagagtcccccgggtatgctagtaggtagccgataattaaccgcctgtgaccatggaacatactccacccctgccttccggatttaatatcaacggctatcttattcaatccctgaaacagacggcccctctctgccatgtttattacgtttcggatgccaaccatgttccatacctgctccgcgaattctgcccccaggggctcgctgtgcgcgacccggaaagcggaaaactgcgttatccggaaaacacggatattgaacgggaagttcttccgctgaaaaatgacttcgaagcccagttccgaaccggttccctgtgggaaatttccgccctgggcaccctgtacctggcttatgccattcccggcagccatgccgcagcggagcctcctcccggtccggtcatccccccggcggagcccctccggagcgatcaacggccgctgtccactcccggaaccggggcggcgcccgtccatgcgggttcccttccccagcctcggaaaaagaaaaactccgttggcctatggctccttaccctgctcctgctgggaggcgcatgcggaacttattattacacccagacaacttcggaaaaatccgtctctctgcaggaaccggccgtcccccaatccggcagggaaaagaagaaagctgccaaaccggaaaagaaagccgtactgcccgccgtaaaggcggaaccccctccggaacagaaaaacgccgtgcccgcctccccgtccggagacgtggaacagccgaaaaaaacaccgccgcctatttcctccggagaaaggaacggaaacgccccggacattttaaagaatgaatccgccgcctcccctgctcagactgccggagaatccgatgtcccggcccatgacgctgcagacggaaaacagccggaaccggaaaattccgccaaccggaaggaagcacaggcggcacaatctgccgtcacccctgttcttgaaacgcgtctacggggaaaagcctccaggcaaaccaccaatatgggagacgtcaactcctatgtgaggaaattcgccaagcccatgacgctgaaccagtggaaaaagcaatacgccaacctgtacacaagctggttcggcaattccgaggaagtagccaaaggctggatcaccaccttcggccccctgggattccgagcccgcggtttggacgcctcctggccggacacgaacttccgcggcttcttccccaagaccatgctggatcccaacggggaacccgtggcgaacctctacacggtcacccaggtgattgagggttcccccgctgaaaaatacatcaaggaaggagatctgatcctgggcattgacggacaccccttcaaaacgtctcaaagcctggacgtgctttacggcccttatcagcaccaaaacaggcgcggcctggacatgcacgcgggcctactggtggacaaggcggaaggagccggaaaaataaccctgaatattattcccgcggaaagcgtggaaaaaatccagggcatccagcctctctggaaagaagtcttacgggaggaacgggcccaaaagcccgtctccctttccattccggtaaagggcggccagcaggtgcgcctgcgcgtggatgacggcggcaacggcattggcagcgacggttttgaatggtctggcctgaggctggaaggccccggcggaaccgttccgctgacccgggccctgcaatacaccgtaggttacggggaggccaagtatgaccccaaaagcagcgtatggcaggctcatgccgtctcttccctggtttttgacatccccaggggagactgggaactcaaagggacaggaacccccaggtggtccgcctccgttggcgtgaccgtacaggtgggaggctcttccactctgccggacgccgtgaagaaatacgtaaaaaacgtcacctttaaaataccccagttgggctcctatgccctcggcttccccaaaaactgcgccaagagcaaggcggttgtccacatgatgagtgaatggctggcggcccagcagcgcgaggacggttcctgggaacgtccgggcggctactgcggcaaccattatgatacgggctgggccgggctggccctgatggccacgggcaaccctaaatatgaccccgtcattaaaaaggcggcgcactacatcgccttctccggctcccagtgctggtgggccgtcccccaggcatccgcaggtatttttctgtgtgaatactggctgcgctaccgggacaactccgttctcccagccatccgcaacggcgtgcagcgcatgaaaaacgaagtcctttacggggacttcgtcaccggccacggcattcacccgggctaccggggaacaggcgtcagcattggcggctcccacatgtgcctgttcctggcgctggccagcaaaactccggcgcgcacggaagacgatgtgctggacaaaatgatggatcatgcccagtccatctgccccaccggcatggggccctacggccgcatgacggaaaccttcacctttgaacccaaccgcgaatgcgggggaacctactccggccgccatggcccgtactacattgcttccctcatctgcggcggcccggaactgtacaccaaaaacagccgcatcatgtacggtgaaggccccatcggcggctgtgaccagggccactcctccgagacgctctccatcatgtgggcccttcccgcctactggcgaaccaatccggaagtatattacaaaaacatggaggctttccgatggaaactgacgctgttgcgcccctttgacggcggcatgatgcagaaccccaaccgcctggaactgatgacggcggatcccgtcatcggcacctacatccgcaccagcatctggatcacggccctttgcgcggaacgccggaacctggcaatcacgggcaagccggaatttcaggcaaagacattccggaaggtgccccctgtcatcgatacggaatcccgcttcctgaatacctacgtgcgcaactggtccatggtaaatgcggcgcttggggccaaggcgcccgcctccctgaaatccgccatccgggaactgaaaaacattcctgtggaacagggctgccgctttaagcttatcaatgtcgtcaacaaccgcgccctccccatcgccaaggctatcatggaaattcccggggtggaccagctcaccagggccacctgcgcggaaatggttctgggcatggatgtgcgcattttctttgaacccaagcgcaaggacgataacccccaacccggggaatattctttaaccgtggatgtccagcagccgctgggcggccgcgccctggggcttcaccgcgacaaggaactggaaggaaaagccaattccgcctacaaatatgactttgccggcacggtgcaattcagcgacacgaccaccttctcccccatggaaaccatttcctggacgcccaattccaaattcggcggacagtggaacgtttattcctacaaaaaggaactcagcggtcccacccagccgggcgtgcagaaaatgaacgccaaaatcaaatggcgcgtcaatgacctggatgtggaatacgaccgccccatcgccgtgggcggctttgaagtgggatgcccggaaaaagccctctcagtcaccaactgcaaccatctgtgggtgccaggcatcctgatccgggaccacggcaactggggatgctccttccatctgccggacggaacctacatttccgcggcctcccagggcaaccagatagaggtgtacgacaaaacggacaaaaaaaagaaaacaacctgggtttccccgaatgactcctgcctgactcaaggttcccgctgcctgttccgcgtttccacggactggcacggcctggaatgccgcgtgcgtgaactgaaactgctgggcagttccacggaggaagtcgcggactataagctgaaagcctctaccggaggccgtgtggatacggccaaactactggacagggacgctaccaccgttgaagaactggacgcgtccccctcggaagacgaacccctggtgctggaactcaccctgaaatcccctgccgccctgcgcgccgtggacatcaagattgaaaagggcaacaaccgtttagtcattgaagccaacaaaggcggcaagtggattcctattcactggggctccctgggggcctctactgccggcgtcagcgatgctcagaaagccatgtacgcgaatgaaccggaagtactgcgcatgctccagcttccgggcaatggatttatcaaatgcatgcggacgtttgaccctgtcaccaccaacaggctgcgcatcaagctcttccagaagggcggaaaagtccgccttgcggaactgcacgtgtacaaggcaaacgccgtcagaaatatggctctccagtcttaaacggctttcacctgcggccaggaataactaaaaaaacttgtgatgaggaaatcccggcaggggcgccaatctccgtgtccctgcaggaaaaaccggacataccattttaaggagggaggaaattccctgctccatgccggggcggccagccaatttcttgtctattgacaccaagccgcgcctcccctatatttccttattatgttcatcaggacaacgctcctttttcctatcctttttctctcactttcaggatcttccgtcatggcggcaaccccttgggcttctgacaggaactgggagctcgtttttgaagacaattttgacggctcatcgctgaacgcacacaactggagccgcattgattacgtaggatataatgccccggactggcgcaagtaccaatcccgggacgaaagccttgtgggattccgggaaaaggacggcaactccgccatgaccttgtggggaaaatacggggactacaccacccaaaccaaccagaccgccccagccaggacatacgcctgcggaggggtatattccctgaaaaccttctccttccaatatggctacgtagaagtccgcgccagattcgactgcgtgcagggcgtctggccggccatctggatgatgcccaaatccgacagcatcggctggcctgtcggaggggaaattgacatcatggaacacctgaattacgaaggccgtgtttaccagacaatccactggtcgcaaaacggcgttcccaaccaggataactcccagggggtcacccccggttggaacgatggtgctgaaaaatcaaactggcatacctacgggatggaatggacggaagaaggcatcaccttttatgtggatggaaaagcaaccggttcattcaaaaagcccaataacgcaaactggccctttgacaaggacggaaacgaattctacctgatcatcgaccagcagattggaggcaactgggtggaaaacgcaggagttaataagggaatcgaccaaaatacgctggccaattccggagccgcattcgacatcgattatgtcaaagtctattcttcaagcatctacaaccacctcgtcccggagcccgctgtggcttcgctgggcctgttgggaatggcgttgctggcggctcgccgcaaaagaaactgattgcccacacaccttttccttttgttcctccctgccgcgggaataaatcttccgggacattcccggcatattctcaggcaaaaaccgtcattggcacctgcctcaatatttctggactggggatgaaggcagtttttctcctccgtcctcttccaggcggcatagagcctccgcacggcggaggcaggaatcccacagggaagccttttccggaaacgggaaacacagggagtcactcagcttttccacccgtttgaaagaatcctcccggtcataggcgttcaaactttccaggcgggaagccaacccatccagccagggaagagggtcatggcaaatcaggggaagatcgcatccggccttcagggacaggaaggcggcgtcatccggtgaatactgcgtcgtaatcgcccccatgcacaaatcatccgtaaacaccacaccccggaaaccgaggcggtcacgcagaagccccctgatcacccgttcagacaaggtggcgggataatcgggatcaatctgaggcagcatgatatgggcggacatgatggaggacaatgccggacacagagccagaaaaggcagcagatccgtcttgaacagctcccgttcatccaggccgatcacgggaaggctgaaatggggatccgccagggcacgccccatgccgggaaaatgtttgccgcagctctgcacgcctccccggcgcaggttggaggcataaacgccgccgcgtgaaataacgtcctgcgcattgtctccccagcagcggccgggaagcgcgttggctgcggacggatcatggcaaatatccagcaccggggcaaaattcaggttcacccccaagtagcggagagccagagccgtcaccgcgcccagttccacgatgccgccaaccgaaccgagccgggccaacgaagccggggagggcaaattcaagcccagggaagcggtgcgaatcacccgccccccctcctgatccacggcaatgacaggatggtggaggcaaagtttccgcagcgactccgtcagaccgcgcacctgctccacggaatcaatattcctggaaaacagaatgaatccggccggctgcaaacgccggatggaagcctcctcctccgcgcccacttcatggccgcttatgccgatcagggcagggagcatggacggaaaaagattaatggcccaacaaggaagtcctagtgtacagcgggtaaacgggaatgccgcgttcctcaatcgcctggcgtccgccttcctctcggtccagcagcaccagggcggcggcaaccctgcccccttccgcctcaatggcatcaatagccttcagcgtggagcctcccgtcgtgataacgtcatccaccacgaccacggtatccccggcctggaaattgccttcaatgcggcggccgcgtccatggtccttcggttctttgcgcacggtgaacacctgaagcgtcttttccgccccttccagagcgctggtcatgccgacggccagggaaatagggtccgcccccatggtcatgccgccgatggccgccacctccgggaaacggggcaaaatatcctccttcaccagcttccagcccagagcgcccaccaaggtggctcctacggggtccaaggctgtcatgcggcagtccacatacaaatcggacaccttgccggaagccagtgtaaaagttcccgtacgcacggatttttccaaaagaatgcttttaagaagatcgtattgttcgctcatgaaaatagggatgaatgaaatggttcgccgtgtataacagatacccccggaataagcaacggataacagcatgcaaatcttgacaaaaaggaggacaggccccataacctgcctgtcattttcccgttcccatgaaatccggcatactggcgttagtttctatcagttccgctcttgtttcctgcacatcgtacgagaggcccccgctgtttgaccaaatcaccggaaaaattcagggaatgtccggacgggacgattatctgtccggggtgggcgccacctcaggcgtcaacacggacctgcctccggaagcccgtctgggccagggatattgggacctgccggcgggcacccagggggaaaagcacatcatcattgacctcaagcagcagaaagtcttctactacgtgggaaccacgctcgtgggcgtttcccccatgtcttccggcaaggaaggctacggcactcccaggggaacatacaaaatcatccagaaagacgccaactacaaatccggcacatacggcgttctgcgcagcaaatccaccggagccgtcgtcaacggggattacaacgccagggctggcggagcgccggcaggaacctactttgaccccgcccccatgccttactggatgcggattacgggaggctacggcatgcatgtgggttttgtcaccggatatccggtcagccacggctgcgtacgcctgccggaggacatggccaagatattctttgaacacacccccatcggcaccaaggtcaccatccgttagccgcttcctgcgcggtctcgcgccgcagaaatgccacactttccggaaaccggcgtgtttcttattcccgccgtccggaagcgttccgtgctgataactgctcccgtttcatggcgcagcttcctcactccggcattgacaaacggctccgaacctttttgaatatacgggatctttgacctcttgattcgtcatgacaatccctcctccccctgccctgccgccccatttcaacataggcggctacaaaatcacggcgcttgtagaaagcggtccggactatcatctgtaccaggctctttccccggaaggccatgccgtcctgatacgcgaattctgcccccggggcctcgttacgcgcgacctggccagcggagaactggctgtctctccggaaaatgaatcccaattcgcccaggcccgggaagcttttgaaacccaatacgcagccaatgcagaaggcaagctgaggggattcggcaccgtgctcttcctttacccgctttctccggcgcaaccccagccggctgcagcgcatgcccaggctctccgccccgcaaaaaaaccgcagcaaccgcaactgcggaaacccgtagtcggcgccgccatccccggaacgccgctgccgcgggtaaagcactccggagggtttccggtcatcacggtcattgtgaccgggatgctcgccctcttcggatttctgggctaccagatactcaaggataaagaagaacccgtcgctaaagctgttaccgtgcccgtaccggctccgcccaagcccaaacccaagcccgctccgccaaaaccggagcccgtggtggtcactcctgaaccggaacccgtggtggtcgctcccgaacctgaaccggagcctgaaccggagccgcctgctcccgacctttccccctccccggaagtcattgccatggaaaaggctttacgggaggaagctatcgcgtccaaggggaaattttctgaaaaactgttgaataaatatccccattacgcggaagcctacgtacgggattacgtgaaaaaacgcggaggcagtttttctccggattttgaaaaatggctgaaaaacacgaaaaacaatcgtgaagtcttcgccatgttcttcccgccggaccccagcgtcgccaccaatgtggctttcatgattgatgaactggggctggaaacgacggaaaaatatgaccagctcgttctggcgttcgcagtaggacgccgcgaattcggcatgggagccttcgaccttacccatcagggccgttacgttgatgccctgggcaagctgaatgacctgagatcctccggagtcatgcctccgccagcggacctgtactgcgccgggaaaccgcccgtcaactggtatgggaacgccccccgcaccgtggatgaggaatgctacaaaaaggtggaagcctatctggaccgcaaaaaaattacccccaagcaggcctggctcaggaaataccccaccgtctcggaaattggggactccgccattacggaagacaacctggccggctttctgcacgaatacatgtaccgccacggccagctgaggcgcaagagggatcccttccccactccggtggaattcttttcctacctggtggataaatatgaacattgcggtgatttgcgcgacgtggaccgcaagcgtgtggaatggaccggcgtctccctggaaggaacgccctggccggccatgatggccctttcggaaacacgccctctgcgtgagtgcgacagcgtgtgggaacgctacatgggccagcggggcccgacccgcctgtggctgtacggcccctaccgggcggatgacgataaggaaccgcccatcctgttcagctttgacccggatccggaatggtccagggaatccaatgaacgcaagctccatgaaggcggcgtgtgcggcaccatgtcccttatctcccgcaattcccagattgcgcgcggcattcccgccgcccccgccgggcagcccggccacggcaatctgatgaccacccatttcaccggcaacggctgctggctgagtgtggggcaaagcgtggacaccctgaaagccaccacggggttctggtacttccgggattccgacgcaccgcgcaccggcaatgcggaataccagtccggactggccctgtccatgaacatcgactatgaaaagttcatcgacagccgattcgccatgaacatttacaaactggcggccaccggctcctccacggaagagacggccgccccttccaccacgctccccaaggaattcacgcagaccgccatgaggaccgtgctcaaggccaacccgttctacacggaagcctggtacacgctcttcaagcaggaaccccaggacctcatgggagccaccaagatggtggatgaagtgagggaggccctgccggacggcatgggcatcagaaagctttggaaaacgcgcaaatacgtttcctccgtaggccgcggcgacaagaacggcaaggaaatgcttgccaaccatgccagggaatacgtcaatgtgctctgctccgtgattctggaaaatgccctgaaacaggaatatgactataagaccttccagtgggccgaactcatgtcctggctcaagtctgaatccaagcgcaactcctacccggagcctcaggccgcctatcagatagcgtatgccaaggcccagggcacggacaggctcaaaagaaccgtagacaggggattcaagaaagctctcaatttctaccgggacgacagcaacgccctgaaggagcccaaggatgtggatcaggaggaaatgtccttttccctggccgccctgtgccaggccctgcccaaggaagaactggtcccctggatgaaaaacatgctggacacctgtccggacgggttcaaatacaagcccaaaaacaagaaggaaacgaaaatccaccccttctacgacgccctgacgaaaaactacatctctctggctgacgattcggaaaaatcccgcgtcaagtcggaaatgaaagaggcttccgacagaattctggagctttcccaggacaagaaaggcgatggaaatggatcctccggacgccgccggagacgctgattccccgcttccgtgcacctctacgtccacattcccttctgccaccgtatttgcccgtactgcgctttcttcaagcacacgccggcctccacggacatgaaatcattcatccgtgctctgggcagggaggcggaatcccgcgcagccgctctggccgcgaaccgcggaggggaaacggccacgctttactttggcgggggaacgccctccatgctctcggacacgcatctggggcgtctcatggaaaccttggaccgtctcgtgcccgtggacaaactggacgaattctcctttgaggccaaccccgccacctttacggaaaaaaaagtgcgcttctggcgcagcctgggcatgacacgcgtctccctgggcgtgcagtccctggattccggcatcctgcatctgctggggcgcgaacataccccggcccaggctctgcactccgtggaaatgctgaaaaatgcgggaatgccccatatcaacatggatctcatgttcgccattccggggcaaaccctctccatatgggaagccaccctgaaggaagctgtccgcgccggaacggaccatatctccgcctacaacctcacctatgaagaagacacggaattcttccggagcctgctgcggggggagaaaaggcaggatccggacgaagacgccgccttttttgaactagcggaacacatgctggaggcggcaggcttgcgccactatgaaacctccaactacgcccgggagggctgcatctccccccacaacatggcctactggaagggagaggactatgtgggcatagggcctggcgcggtcagcaccatcaacggcatacggtactccaacacgcgggatacggacgcctacatacgcagcacgctggaaaacggcctccccctttccgaacaggaacccgtcaccgaggaagactaccgcctggaacgcattgccctgatgctccggacggatgaaggattgccgctgaaatacattctgccggaatcccgtcctctgctggaacaataccgggaactgggcctggcggacatttccccggaacaaaggctcatcctgaaaggccgcggacgcctgctcgtggacgccatcgcagcggaactgtgctgatcgccattcccttattaacttaatatcctaaattgaaaaatacatgaatttggtttcttgacattttcaatttttgtacattattttattatgtgaccataagtggtacaaatatgttcgtatattcacatattctctctacttttttaacaggatttgttttcctgctacagatttcttttaatcaggcgtcaggagctaaacctaaaccttcagcatcggtacaggtcacccaaacgttcatcctgcccttttacctgaaatccaaacctctttctgaaaaaaagctggttttccggaaagcactctctttttttcccttttctgaaaaaaatcccagaatacatcgcttcgtccgggaatatccggggctgacttttgacgaaggagtctctcttttcgttcagcgaactgctttgggacaaattcccggagatgtgtgcgccagacttcatgaattgacagctttgatgcagcacaggaacatgaaatcacggcaacggaattcctgtcttacgggatttctggaaaatgcctttcttcgggcctattctttccgctatgctcccattgatcttgaagctctatcgctttgcgctctgatagaactggaaatggaagacgggtgctctttaagccttcgaacacgcattttaaaaatttgggaaaccgcggctatctccatggaaaaagggaacgtcccgcaaagaaaactggcctcattattgtttataaggactctccggtatgggaaaaaagacccctacctgatggcccgttgcggataccggcttgccaatctttacatacgcatgaaggaacctcaaaaggcccagtgggcggcatcattcatcccgcctatccgtggcatggaagactctcgttctttaattcaacaatggactgcttcctcttccaagaaaaaaaagcgtaggaaataactccgtcaaccccatctaaccattcatgaatcaagcatttatttcccgatgtttctctcaaatgccgcttttgcttttattttccagcatcacggcattcaccacccttcacgcaaaaggccagcaggtttatgaaggaaaaacaacactggaacaaactctggcacctgtggaaatagttaacgatctctctcagcttgcggctaaattaaaacaatgctgtgccggggaactgaaaatcccaaatacaacaaaggtcactgacccaaaatctccctctactattccttataacggaaaaatttccctcaaggattttaaggatgaacgtattagccaacctactactgttgcgtggctttcattgatttccgacgatggatgcgacattgcctatactacaggggacggagaaaaaacagactggttaaaagaacacggaaaaggacatgacatttccaaagggcgccgggattgcccgcatgtcttgaaagcaggttcttacaatttccaaatcaaatattcgcaaacctattacaatcccaagccgggcacaagtgatttggacggcatcagccttgtagtcgctcccattgtcgtggacatttgcattggagaaaaatcgatcccatatagtaaaagccaccttttcttggagaaaaaaacagaactccggctcgctatcaacaaaatttacctggcaaaagggccttccgaaaactccgaagacatatccatcacatgggaagctcaaacttattccaaatgcccgcaacgatttaatggagttattctggcgtgcaaccatacgttccaaccaaacaacggcgcctggaaacccatcggcaaaggcccatgcatcacctatactccaacggaagcagaactaattcgtgtgaccatcggtgataaaagtttttattacgaaggcattcccaatcgtttaggagaaatttactgggccatccgcccctgccagggactgcccatagcaaaccatcactttctgctctttgtccctgacgacccggtaaaattaaatcttccgaaccctgggcttgctaactgcaccgctatccccggaatgaaaatcatcactatcggaggggatgcagggccagaaatcaaataccgaaaaaaactcaaaatcatcccagctgccggaaccgtttattataagtggatttatgaatccctatctcctccatttgctcaagcaggtgtagccagcaaatatattgattgcttaactaacatggtttaccataaaaatgacaatcctgatatagtagctgttgaaaactggttcaaaaacaaccatgataaaaaatttacaaattttacaaatatcatagccattcaaaacaagaaactatttcaaaaagttcttcatttttcacaaagttataatgagcaggaacgatatctaaccaatccatcaactaaccgaaatccagaaagtacagaaaatggatcaaattgtgcttccttagtttcttctattttacagtatagcggagccacttgggaacagatacttgaatcagctgacacaaacggcattgatgttggagaacgccatcttatccctattaaacgtttcaatccctaattttcatgatacaatcaaccaccatagcattcttatcgtcggcttttatatatttctcagtttgccaaggagatatttgtcaaatcaatggtctgagtccagaagatttgaaaaatctctcttatgaccctccaaggaatgaattgctttctgaggcacaagataaaaaggcatggcagacattcgttgaaacctatgaagcgcctgtaggtaaagtacaggattggtataattccatcagggataaagattccgctgatgctgcagccgatgcgttcaagagagatgtcctgcccattcttaaaaagctgacgggacgttctgctgatataaagaaacaagtccttgctattccagcttcttctgaaatgcaaaaactgattctttcacgtatcctcacattgcagagccgcttgctaataatttttcttcctatgcaaaacagtaaaaagtcaagttccgatgcttgttatcatggcagtgaaaaactctttgacatatttctaggtctaacgtcaacaacagccatggatatttcaaaatttattgaaactcaaaatgaagaccaggaaagcattgaagcagctttcaaagaaccatggacagagacatcatcttcttaaaaagcaggttacatagaaattgcgttgatctctattgaatttccatccttcttttattccccttcattcaggaaccctgtcatgcttccataatctgatgatcttgaaatactcaatcttcctcaccgttgcatcttccatttttatttatgattcagcatgctatggggacacctgccaaatcaatggactggagccggaagtactgaaaagcctttcttacgaaccgcccaacaaggaattgctcgccaccggacaaaatcaaaaagcatggcagactttcattgaaaactatgaaatccctatccgtaaggttcaagattggtataattccatcgtggataaaaattccgcagacgcagcggcaaaatctttttctacggaagtttcacctatccttaaaaaacttacaggacccgctgccgatatgaaaaagcaggttttatctattcctgcttcatccgagatgcaaaaatttattcttttgcgcattcttcagcttcaaagccgtctactggtcattttcctccctatgcagagtgaaagggaaatggacgacaacacctgttaccgaggcagtgatcttcttttcgatactattctggaacctacagctcaatcagcccaggacgttgccaaattcattgattcccggaatgaatcccaagagcatatagaagcttcatttaaagagccctggtccacatctgccgaataaattattaatagtgcaactattttaacctttatttggcgcaggatgtgaaaagcatctttccggaatcccgtcctctgctggaacaataccgggaactgggcctggcggacatttccccggaacaaaggctcatcctgaaaggccgcggacgcctgctcgtggacgccatcgcagcggaactgtgctgacggatagtttttccgcctcagagatcagcagtctgcggaatccagtgcgaaccggatactggaataagcgggcatgggctattttgttccctgattttcaatatccaaggagcatccagtaaaaaaagataccggtatctgcgtattcggatgttgttttttcatcccggctctttgaaaaagggatttctttttgtgaccgtgcggctctctgcaaaaagattccatgcaacaggaatttcagcaaggggcgtttcacaaaaacaatccttcacgccggcaacacccacgtatctaatcaatctggaactggcgtgccatttttttcaaccaccagtcccggtgcctcatctcgtcccggctgcgttccagttcccgaagctcgctgccccgcatccctcccttcatgtagcgttcatccagcttgcgcgcctccgcacgggtatctttccgcagagctttgtaaaactgggcccccgtcaccagcccgccggctgcaccgctccggcccaccaggttcatgtaaagtttcttcagcctgttgtaatcctccaccacctgattatatttcaaagcggcgtactggtaacgctccttccagtcctccggccccggattgaccagacgatcatccagagaaccgggaaccggcgcggaagacggggatgccagccctccggaggataatggcgtaagcggcggaggctggggaacgggcctgcggcttgtcctggaaacaccgccgaccgtcacggaaaggggggagcgttcctccagcagagcgtccatgcgtgcctgttccaacgtttcccgcagatgggcacgttctttctgcagggacgcgttcaagtcgcgttcttctgaaagcgactgcttcagcgaccgcatgccgccggacatttccgagtaaaccagcgcataagccccgatgcaccccagcagaaagcccaggcccagcatgatgcccctttcccgccacggtccaggactgcgttccggagccggttccggaatgtccggttccggctcatgggaaacagtcaggtaatgttccagagggccctcgtcaggcatgggctgattcagggttgggacgggaaaaacgcaggttcaagcctgttcaggacgaatgcagtccgcgccgaaatacggcacaagcgcctccggaatccggatggagccgtccggctgctggtaagtttccagaagggccacatacagccgcggcagagccgtgccggaaccgttcagggtgtggcagaactggttcttgccgtcggcatccttgtaacgcaggcgcatgcggcgcgcctggtagtccgtaaagcaggaacaggaagaaacttccagatactgcccctgtcccggagcccatacttcaatatcatacgtcttggcggaggaaaaaccgaggtctcccgtgcagagctcaatcacccggtaatgcagccccagtttttgaaggatggattccgcatggctgcggagcacttccagctcccggaaggagtcttccggctttaaaatctgcaccagttccaccttgtcaaactggtggacgcggatcataccgcggttgatgcggccggcgcttccggcttcccggcggaagcagggcgtgtacgcggccatcttgatgggcaggtcgctttcctgtaaaatggtatcccggtacaggttggtgaccggcacttccgccgtgggaatcaggaacatctgctggtcttccgtgccgtacatgtcttcctcaaatttaggaagctggccggtgccttccatgcactcccttttcaccacaaaaggaacgcccacttcctgataaccgttttccacggtctgcgtattcagcaggaagttgatcagggcacgttccagacgggcacccgccccacggtacaccacaaaaccggagcccgtaatccgcgctccgtcttcaaaggaaatcatgcccagattcgcggccagttccacatggtccttcgggttttcaatagcgggcttttctccccaaagcttgatttccgggttggccgtttcatccgcacccacggggcattccaggtgcggcaggttgggaatgttcatcagcagggaggtgagctgggctgcattttcctccgcgacacggtccagttcccggatgcggtccccgatttcgcgcacgcgcgcttcaatggaggaagtgtcttcccctttcttcttgagcatgccgatctgcttggaggtggcattgcgctcggactgcagggcctgcttttccgtctcggcattgcggcgcgcttcatcgcaggccagaacgtcatcaacaagcttccacgcgtcgccgctgcggggctttagccgcgctttcacttcttccggattttctcgtattacacggatgtcgagcataacgcgcacagcttgcactccatccccccgccacgcaagccaaatgaacggccttccatggaaaaacgttaccctttcacggaaaaacgctgcgcgcagaggcatgctttcccgaatgccgcccctttccggaaactgccgtttttcccgtgtcagacaatgatttttttccttctcaggaaaaccgtacagcaggaggaccggactctccatgtttccgggaatcatgaacatccggcgccagggtgcattacaggaaggaccgggaaggaacttccccccggttccaacaggcggagttcctttcatcactatttgttcttgaagaatccgggcggctaaggatagtgtaagggcatcatgcaacaaaccgcacgcgccgctgtcctgacagcaccaaagacatttgaaatccgtgaatatcccattcccgccatcggagacgatgaaatgctgatcaaggtggaagcctgcggcgtttgcggaacggacggccacgaatacaaccgggaccccttcagcctctgccccgtggtcctgggccatgaaggcaccggggaaatcgtcgccatgggcaggaatatcactaaagacaccgccggaaatcccgtagcgctgggggacaagatcgtcacctgcatcattccctgcggcacctgtgacgcctgcctgaatactccggcccgcaccaacctgtgcgaaaatgtgggcgtgtatggcctgatgcctgacgacgacgtgcatctgaacggctacttcggggagtacctcgtcatccgcaagggctccacatttttcaatgtttccggcatgacgttggaccagcgcattctggtggaacccgccgcagtggtggtccattccctggaacgcgccaagtccaccgggctcctcaagttcaattccgtggttctcgtgcagggctgcggccccatcggccttcttcaaatcgccacgctgcgcacgctgggcattgaaaccatcatcgctgtggacggcaatgactcccgcctggaactggccagggaaatgggagcatcccgcacgtataacttcacccggtacgcggatctgaacgaactgctggatgccgtgaaaaaggacaacggcggccgcctggcggacttcgtctttcagtgcacgggcgtaggcaaggccggggccaacgcctggaagttcgtgaagcgcggcggcggcctgtgcgaagtgggctttttcatggatggaggggaaagcgttatcaaccaccattacgacctctgcaacaaggaggtgaccgccgtaggctcctgggtgtactccccgcaggactacccgaccacattcgactttctgaagcgagcctacggcatcggcctgccgctgaccaagctgatctcccaccgcttcaagctggatgaaatcgcggaagccctggaaaccaacgttcagatgaaaggcatcaagattgccgtcatctgcggctagccggaaaactcttcatctcttcccatgccgccgtttttcaaaaacggcggcttttttacgccatctttccccgtaaaaaaccactcagcctcccaaagattaatcatcatcccaatccagaaaacggcccgtattgggaggacaggccatagcggaagcgattttttccttcaactgctccagtgcatcagggtcaagaaccatgggttcgctcgctttaaggcacaaacctttccggtacacctgcctttccaacgtcagatatttattgacgatgccattggaattcagggcggcgtcaacgacgaaatgcagcagataatcagcatctccaaggtaaaaatcaaactcataaatccaggaaaaacagtattcttcgtcctcttcgcaaatcatttccctggcaggaattccgtcatcatacagatgattgagttcccgcaacagggtcagaatatgctcacgcctccgcacggttacctggcatccctgctccccaaccatgccctgaaggcagtcgatgaccaaatcatcacactgttcttccatggcaaggagaacttcccggacctgcgcccactgccgctccaatggttcctcggaatacataaaccgggcaaagggggaaggttcacctgccccagcgttccgtaatgccgccgtaggagtcaatgcggcggtcacggaaaaagggccagatgcggcggtggtcttccaatgcgtccaggtcaaggtccgcgtacaggatggcttcatcgctgacgggagccttcgccacaatctggccatagtagtccgccacaaaggactgcccccagaattcgctttccccttccgtccccacccggttgacggcgcagacatagcagccgttggctacggcatggccgcgctgtacggtttcccacgcgcagtgctgctgttcccccagcaggggcttttcctccggcagccagccgatggccgtggggtaaaaaatgatttccgccccctgcatggccgtcaggcgcgcggcttccgggtaccactgatcccagcagatgagcacgccgatgcggccgaatttggtgtcgaacgccttatagcccaggtcgccgggggtgaagtagaatttttcctcaaagcctggatcctgcggaatatgcatcttgcggtacatgcccaggaacgaaccgtccgcatccaccacccaggcggtattatggtaaagcccggtggcacgcttttcaaagccggaggcaacaatcaccacgcccagttccgccgccagtttcctgtgggcttccgtcaattccccgggaacaggttccgccaggtcgaataaatcgcattcctccgtcctgcaaaagtattccgtggtaaaaagttcctgggtgcagacaatctgcgcgccgttggcggcggcttcacggatggcggattccgtcttttccttgttcacggaaggccgggcatctgcggacagttgaatgagtgcaattttcggcatgccccttccttaccccgtttcccttcccattccaagcagggaaaatgaacgcggcgcgattatttggtggaaaacggcccggaaagtgctatgaaattgcaatatggaacccgtcacccccactctgcccgacgacgacgtagccgccattgaccggctcggcgccatttacaaggagctttcctcggaattgagcaaaatgatcattggccagcagcgcgtcgtggagctgctgagcatcgccctgttttcccgcgggcatgccctcctgatgggagttccgggcctggcgaagacgctgctggtcagttccgtggcaaaaacgctggaccttagtttcaaccgcatccagttcacgccggacctgatgcccgcggacattaccggcacggacatcatccaggatgattccgccggcggcaagcgccagttcgagttcatcaaggggcccgtgttcgccaacatcgtgctggcggacgaaatcaaccgcgcccccgccaaaacccagtccgccctgctggaggccatgcaggagcgccgcgtcaccgtcatgggccgcaccttcaccctgctccccccctttttcgtgcttgccacccaaaaccccattgaacaggaaggcacctaccccctgccggaagcccagctggaccgcttcatgttcctgattgaagtggactaccccacggaggaggaggaaatgcgcatcgcccgggaaaccaccggaacccggagcgaggaactcaagcacatcctctccggggaggaaatcatcttttaccaggatctggtgcgccgcgttcccgttccggaacatatttacgagtatgccgtgaaactggtgcgcgccacccgccccaccctggaaacttccccggaatgggtaaagcagtatgttgcctggggcgcaggcccccgcgccgtccagttcctgattcttggggccaagacccgcgccgctctccagggcagctacatcgtccgcagggaagacatagacgccattgtggaacctgtgctgatgcaccgcgtggtcaccaacttcgccgcggaatcccaaggcatcacgccccgtaaggccgtggcgcgcctggcggcggaaatctgaccgccgtcccggcatcctcaatcccctttccctgccccatgaaatacctgaatcacaacctgctcagccgtctggggaaccttcccctggaagcgcgccacagcatgacggggaacgtatccggccgccacagaagcgccagccgcggctcctccgtggagtttgcggaataccgcaaatacgtggccggagacgatacgcgccgtctggactggaaagcgtatgcacggtcggacaggtattacatcaaggagtttgaagcggataccaacctgcgcgcctacatcgtcatggatctttccggctccatgaattatcatccggaacaggtggaaaccaagtatatgcgcgcgtgcaggctggcggccaacctggcttacatcgccatccggcagggagacgcggtgggactgagttttgcccgacagacgaaggacggcgccgcgctgcacatccccgcctcccgccgccccgcccacctgaacgtgctcatcagccagatggacacgcattccccgcagggggagaccgtccttcccgataccctgcatgaactggcggaacgcgtcggccgccgcgccctggtgttgattttctcagacctgttcacagatacggcggagcttaaaaacgccctccgccacctccatttccgcaagcatgacgtagccgtattccatctggtggaccagctggaaatagattttgactttgaccgccccatccgcttcgtggacatggaaggcggcggctccctgattacggagccggaccttatcgcggacgagtaccgggctatcgtgaccagctatctggaagaaacgcgccggatctgcacggatatcaatgcggactaccgcctggtcagaaccggggattccctggaagacgtgctgaccggcttcctgatgggacgtcagaaaaagaaggcggccggataaatgcccggctgtctcacggaacggttgattgctccgcggaacggatgcaggatgcacccagacgctccccggcttgcaggaagcgtctgtttttcatctctttcccttttttccattgtggatgcacccgttaaaatgatcgtgggcctgggcaacccgggcagaacctatgaagacacccgccataacgcggggttcatggtgcttgaccgcctggccgcccggtggggggccgtattcaaggcagacaggcagcgcaagtgcgaggtggccgccggccccggcgtcctgctggtgaaaccctccacgttcatgaatgaatccggtctgtgcgtgggccccatgatgcggtttttcaaactggatccccgcagcgtgttcgtcattcatgatgaagtggatttccccctgggcgtgatcaagctgcgggaaaaaggctccgcaggcggccacaacggcattaaatccctcatcgcccacatgggcacccaggaattcccgcgcctccgtttcggcatcggccagccccgtggcaaaggggaaatgatagggcacgtgctgggcaaattccgcccggaggaacgcgagcttctggacgtgacgcttggcaaggcggaggacgccgtgctgtacaccatggaacacggcattaccagggcaggcaatattttcaacgctgttccaggctgacagccgcatgaaaggccgccccatttgcgccatgacgcatccctggacgggccggagagcgttttttcctgaagacggagcagtccgggccgcaggatgatacggctgcctcaggcgcccggcggcgtccaggaatactcagggggcgcgcatgccttcttttttcgcccgtccgccatgtacggtattgctaaacaaacgggaatccgttaggatttttgcaccttttcccctctcctcaggaccaatcctgcttcatcttcatggctgaattaagttcacaagctccccgcaggcacatgcaggccaacaaaaggcggcatcccaaggcaaagcccaggaaacgattctggagctttatccgaaagctggtcttgtggtgcctggtgatggcggctatcggcgcggccgtgggatacttcggattcatgatggcctggaaacgttatgacaactgggcggcggaatttgatctggaacgcatcaatgacctggaaaaacccagcattatttatgaccggaacggggaggaaataggccgtatttatgtggagaaccgcagctacgtcactctggacaaaatctcccccgccatgattaatgcgctgatcgcccaggaagattcccgcttccgggaacatccgggctatgacttcctggggattctgcgggcaggccgggagtatatccacaacagcggggacgccaaccagggcgcctcctccatcacccagcagcttgccagaaatgcgtatgacctgaaaaaccgtgccaaagccaggaatgagggcagctttggccgcaaattcgtggaaatagcgctggcgcgccgcattacggaacggtacagcaaggaccaggttctggaattttacctgaaccgcgtttacttcggcagcgggttttacggcatccgcgccgcttccctgggctacttcggcaaagagccggcggacctgaccacccgggaggccgcctccatcgccgccctgatcaaaaacccgaacggactttcccccctgaataatccggcgagcaatctgaaatggcgcaaccacgtgctcaaccgcatggccaaggagaaatacattacgccggatgaagcggaacgcctctccgccatggagctggggctgaatcccaagccgctgaaacgcggcgtctcccacatttacgaccgcatttcctcagaaatcaccgcatacctgggagaggagcgcgtcaatgccgccgggcttaaaatttacaccaccattgacaggcagctccaggaagttaccggaaaagccctggaacaggctctggaaaacattgaaaaacaacccggttaccgtcatcagaaggccgcagactaccacagcggttccgcgaacaagccgcgctatctggaaggagcgctgctggtggtggacaacaaatcaggcgccgtcctggcctaccacggaggcagggattacaccaagcgccagtatgacgccatcagggacggagcccgccccaccggcacctccatcctccctttcctgtatgctacagcctttgacacgggaaaaagccccgtcacccgcattctggacgatgccatcgacaaccgcctgacgggcatcggcggttcggaaggaatcctgggggaatggggggcggaaaactccaaaaaccgttatgaaggcatgattaccgcccaccgcggcctgtccgcctccaaaatcgccgcctccctgcgcatggggatggagatgggcacggccccgttcgtcaagaagctgacggatttcggcatccgcaagcccgtgagggaagcggggagcacggaagtaaaccccgtttaccgccccaaaattttcgtgggtacggagcctgcctccctgaaggaaatgacgctggcctacaccgccatcccgaacgggggttcccgccctcaggatatttactatctggacaggatagaagatgaagacggccagctgatctgggaatccacccaggcgattgaaacccggaacaatgcccaggtacggaagggggccacatccacagccacggctttccagcttcacaacatcctgaattcctccctgaaaaacggttcagcccagcgcgttgccccgcatctgccgaaaaacttcaagggcggcgtgaaaacaggcaccacgtacgacttcgcggacaactggctgtttgggtatgacagccgcattacctgcggcatctgggtaggtttcctggaaggcaaaaagcccatttatcacggagccttctcgtcagacacctgcgcctccgtgctgggcgccgccatcacggaagcggaacggcagttccctgccggagaactggcccctccccccagcgtagagcgggtggaaatctgcctgaccaccgggaaaagggccacgcacagctgttatgacattgacccgtcggataaaaaataccgccgccacaccatattcgaatacctccgcaaaggggattccagcctgcctttctgcgacctccacggggaggacgtctccgcacccgtctccaccttcacggcccagaaccgcattcttcccctgccgcccatcctgcccaccaggcccatcctccagggggatgatccctaccatacggagctgaaccaggtcccggccaaccgcaactttgaactgctgggggctggcgaaaacgtgccggaagcgcaagccatttccgcagatcccgtttcttcagaccatacggatacaagcattacgctgccggcgcccagacccatcaccattcccgtgccggaattcatccacctgtaactttttcccctcatgccttccccatcccaggacacggtagcctgcacatgcccgtcatgcggcaacctctttgccgtgaaggcgtcttttctgggacgccaggtaaaatgccccatctgcaccgcttcagtaacagccaggcaggaagaaaagcccaggccggaaacggaagaacaggacgccgtcccctgcctctgccatgtttgcggcaatccctttgccgtcagggccgcctgcgtaggaagccgtgtgcaatgccccgtctgccactccgccgtcacggccgtcaaacaggaagaagcactttcaacattcccgggccggacgcctgaagttgcagagaaagcgcccggaaatccgaaacaaccggctattccgtcatctgccgccggtgttccgcacacttccgcgtactccgctccgcatacaccgctcgcaccaaagaaaaagacggacagacggaccatttccgttcacgggcctaccactccgggccccaataaatccacgacaaaaatccgtaaaaggaaagagggaaacgccgctccggccattgccgcgccacgctgcgccgccctggccccggaagaaccggaataccgcactgccgccgcggaccccatgcgcagcgaacgccggcccacttggcatatatggctttttgtcgcgggactggttctttcccttctgggcgtgttcatgttcctgcgcgggagggatatggaagcggaaaactccaaacttctgaatatctcagaccggttcgtggatcatgaagcgctcttttcacaggaagtgaataaagacctgctggagcaattgcagcaaagggagcggcaataccggctcatagcccacagccgcagggaggaagaccggaaggcggaatccatttccccccatattacggcggccatgaatgaactggccctctactgcatggcggaatcggatgaagagaggctcaactacgtaatgaatcccgcagccgtagctcccaaaatggcctattgggcctcctacggccaatacaaggactacctgccccaggaagcgggcagaagctccaaaaacggggacctgcttcagatctccgtgctgatggacgacaacactatccgccctgcggttttcctgtatgaccggaattcaggaaaatggaagctggactgggaagcctgggagggctattcccccatgcttccggcggagctggaagccaaaaagccctccacccccgttcccgtcagaatcatcctaagcatgtccggcatttatcagccccctttcctggaggaatcctccgcggaaagctaccgcaacacgtcatatctcaacttcacccttgagttccccaacggggaacgcctgaatgcgtacgtggacaggtattccccactggccctggaactaaccaggctgctttacaacggccccgtgcgcacctgcgtgctcatccgctatccggaagacctgcccggcaaccgggccgttattattgaccagcttctgcactccggctggatgagcgacgccacccgcaggcttcttcccccccaataattgaaaatcaagaatcggttcccgctttccatgagttccaaagcactagcgcaaacacaggacaaagccctccaactcaacctggcttccaccatttacggcacctttgcggaaatcggagccggacaggaaacggccaactggtttttccgggcatccggagccgccggaacagtggccaaaaccatttccgcctatgacatgaccgtcagcgacaccctgtacgggccggtcaagcgctacgtttctgaagaacgcctgaaaggcatgctggactacgaatttacccagctcatcaaccgcctgggcccccagcgcggcaaagacacccgcttctttgccttctgcaatacggtaaaagtcaaaggctaccgggacaacggcccctggcacggctggataggggtgcgcttccagctgaaaccggaggcaaaaccgtccgacctgattattcacgttcgcctgaacgacccggaccacgaccgccagatgaaggacctgggcattctgggcgtcaacatcctgcacgccgtctttttcaaaagggaccgtctggaggaattcattgaatccctggtggacaatctggatccccggctggtggaaatagatgtcgtccgttttgaaggccacggtttttccatggtggacaaccgtcttttcgcgctccagctcgtccagtccggcctgacgccggccaccctgttcctggcgaacggccaggtggcccaggcggcggatgtgctgtacaagcgccccatcgtgttgatgaggggcagtttcaaccccgtctgcaatctgcatctggaagtcatggcccaggtgaaaaaaaccttcctctcccacatcaatgagacgcaggcggaccgctgcatggaaatttgtgaaatatccatgaataacctgctccgcggcgatgatgtggaccatctggaattcctggacagggcggacagcctcaaggctctcggcaaaaacgttctgattaccaaaatggcccgtttcgacaacctgtccgggctgctggcgcgctacacgagagaacccatagccatcgccctctccatcggcctgctgaatgagctgttcaaggaaaaatggacggaggacattcccggaggcattctggaatccttcggacgcaccttccagaacaaaacgcgcctgtacgtctccccgtggctcaaccgcaaatccggggaattcgtcacggcacgcactttccgcgcgccggaacaatacgtgcacctgtaccagcacttcctggcgaacggcctggtggtggacgtgccctttttcaatgaattcctgctgcgccacacgccgcgggacatccagcgcatgatcgctgcggatgaagacatctggaaaacgctggttccggaggaagcgcaccgttccgccctccacttccgctgagttccttttcagcaggccgccccttcctccccgcggcacggccctcccaatgccgcggtctctccgttcctgaaaccggataatccggcacggcccctcccgcctgccctgccgggcttcccgccactggtcaggaaaacttaacaattccgtaagattgtcttgccataaggcaggaatctcattaaggtctccgagttccatttttatcatgaataccattattatcggctcccaatggggcgacgaaggcaagggcaaaatgatcgatttcctgacggaatccgccgacgtggtggcacgcggccagggcggcaacaacgccggccatactgtaattgccaatggaaagaaatatattctccacctggttccctccggcatcctgtggccggacaagctttgcgtcatcggtaatggtgtggtgctggaccccatcggcctggtggaggaaatcaatgaactccgcggccagggcgtgaccattacaaaagacaaccttctcatctccgaccgcgcccacgtggtccttcccttccacaaggaaatggacgccgcccaggaatccgccctcggcaaaaaagccatcggcaccaccaagcgcggcatcggccccacttacgcggacaaggcacgccgcatcggcgtgcgcatggcggatatgagggatcccgcgatttttgacgaagtgctgcgccgccgcatcaagatggcgaatgcggaaatggaacgcatgggccttcccgctatggatgaagaaaaaatggtggcggaagtaagcgccgccgcggatgtgctgcgcccccacatcaccaacaccattccggttatgcatgaagccgtggcctccggaaaaagcatcctctttgaaggggcccagggagcttacctggatgtggacttcggcacctatccgttcgtcacctcctccaacacctcttccgctggcgcctgcaccggcacgggtgttcctccgcacaaaattgaccgcatcatcggcgtctgcaaggcctacaccacccgcgtgggcgcaggccccttcgtcacggaggatgaagacatctccaaccatctgcacagcatgggccgcgaattcggcgccaccacgggccgcccccgccgttgcggttgggctgacggcgtgctgctgcgcttctccgccatgttcaacggttttgatgaaatggccatgaccaacctggacggctacgacaagtgcccggaaattaaaatctgcacgggttacgatctggacggggaaatcctggcttatccgcccgccacagtggatgaatgggaacgctgcaagcccgtgtatgaaacggtgcccggctggatgcaggacatttcctcctgccgttcctgggaagagattccggaacaggccaagaaattcgtcaaacgcatgagcgagctcatcggctgccccgtcacaaccgtgggcgtaggccccgaccgcgaacagacgattgccgtgcaataaacctcggcagttctcgttattatttccttcaaagcagttccgcatgcatggcggaactgcttttttattgtcagctaataaaggccgaacacacgtttcaacgctttctccgccaccgtttctccacggcagcggcatgggaaaaacttattttccaccctgcatctttgcatgaagcgcagaaatgcctcctctaaaacacatgaaaacgacaattttgccgcttccaggtcaggaaaaagcaaataaatatcatccaaaacagcccggcggaactggtgaagctgccgttggaaagcccatgcctgggagttcccggaatgatttgacggatacggatacttccctcctgatgataataaaagaggaggcgggatctttcccgcctcctgtaaaacagcaattggactccccggcttaggcacgtctgcggcgcatcatgagggcagccagaccaatcaggctgagggatgccgtggccggttcgggaacggcagccgccgcaatggcattaagattggcttcctgggaagcattagcctgcaacgtggtattatccacgacaaggtatttgacgtaatccgtgccataggtaaatgaagtcagggctccgaacccgctcgctttcaaccctgaatcctgaccaccataagtggtggcggttccttcggaatcaaccagggtcaggtaagtccaggttccggtgctggtaatctgataagtgatggcggcggattcatagctgttttcggtgaacaattccttcaatcccgtattcaaattgagttcagaaccgttgacagaagtaatcgtgcggttgtagttctctccttgccaggaaccataaatgcccgccgtgggagttcctgaagaaacgtagttgaggcccaggccgatcatattattattggcggaaaaaatattcgccttgacgttacctgccagaatggcgttttggaaagcctgagcgtccagggccatggtcacggagaaattgccgtaaccggagtttataccctccgtcagggtatatgatccgcctgctgcctgcaattcactggaatccaaagtaaggacggttgccccctgaaccatgagggaagaagctactacacaagaaagcaaaaataatgttttcttcatttgactgttctaggttgaaaagaaaagagcgacgcgctctcccagtgcggtacatataggggatttagaatccgggaacaataacaaatattgaaaatcaacgtctaattcatcttaatcagttgttttttaatatcatatataatttctggtctttttttatttcatcttatccgaatacaggtaaatatgttatgagaaggagaaaatatttaagtgcgcagcggattctaaattcgcaataaaaattacagagaaaatctgatgcttttttcccgttttacactccttttggctccctcacccgacgtacattcagacagccccctgcaaaaaacaataatctccctaagctaccatgttccaactggttccacttcttttgcggaaggaatacggcggtgggagctgcccctccgcttgccctatcatgcctgtcttaggaaaaggcccctgaaggacagcccgcctttcctttttccggaaagacggtgaaaaacggatattcgtgtcagcatttaaacggagttatgatacttccgggaaaagccttgtctgactgtctgtatgagacatgccattcttccctccatgtgcgctgttgccgtcgcagcctcctgcagtcccacccttgcccaacaggcggctcccgctgcggcggcttcccctgcttacctgaacacggaacgcggtctgcgcgtgaaaactctggaaggcagggaaataagccccagcctgatgaaaggaatgcgcccggaagaacaaatcaccaaaaggacgcccggcgttcccaccaggcccagcgtactgcttcagcatgaaggcggaacttccgctcccggcctggaatggtttgcggccaggccccttaaaatgatgccgtacctggacagttcctacgttttcggcaatacctgtgcggaaccgaacgcctggatacgcgaagacatgatttccaccggagcgcaaaagctcaagaccgctctctccagatacggcattacttattccgcccagttcggattcaactacacggggctgacgggcggcggcctgaacggaaaaacggatttcccctcctacaatggttccctgctgaccaatatcaccatcttccgcaatcattccacgggcagcggcctgtacctggcctccgagttcgacttcggcaacggctttgacttcaatgaaggcagtaaaggccccaaaaccacgctgggctccctccagaaccccaccagctccttccagggcccggacccccacctgagcaacctgagcctggcatgggtgggagcgggaggaaagcttctgctgatggcgggccagctggacaccaccaactacatggaccacaacgcttacgccaattcccataacaataacctcaccaacagcgttttcggcaataatcccgtactccccctgactgataattccctgggattccatttcgcgtggcagccaaccacctccttttacgtgatgggagccactgccgccaataacatggctcaaaaccacaatcctttccggaacctgaattccgacaattggacgaacgtgcttgaattcggctacgtggcggaagatttttgcagcatgggccccggcgtgtaccgcctccagccctttttcaccaccagcaacggtgaaaacgggggcggcgtggccgtaaacttccagcagcagctgggccgcagcagccacctggggtggttcttccgcggcggctgggcaagcgatgacgcagccacgctgaccggcgtacgctgcgcggccaccacagggctggtgcttctttcccccttccggggaaagggcgcatccaatgacggatacctgggcctcggtttcctctggcagcagggggctaaaaagaacggcccgtacgtgaacaggaatgaatacggcattgaattgacgtatgtggcccaggtgacgcccaccatgactctccagcctgatattcagcttgtcaagaatcccgtcaacggccgcagagggcaaacggcggtggttttccagatccagaacgtctggtcctggtaaaagccctcccggaaaactggaaaatattgatcgcatttcccggaaatcctgtctaaatggaaatgttcttatttggaccacgcacatgaagcgcattcagcaaccttccatgcaggaggcggagcaggcctccctgaatcatgagattttaaatacatggcgtcccggggaaactctgggggaacacatggagcgccgcggcgtcagccggcgcgaattcaacaagtggtgtctgaaaatgatctccctgatgggcgttgccactgtaacgggcggcatttccaacgcccaggagattgcggacaagatggccgcattgaaacgtcccgtagtcatctggctccagcttcaggaatgcaccggatgcctggaaagcactatccgcagctataacgaggaaatcggggacatggtgctttccgccgtctccatgccttacgtggaactgctgatggccccttcaggagaggccgccaataaggctctggaagacgcgatcagggagccccacatcctcgtcatcaacggttccgttccggtcaatgacggcggggtgtactgcaccgtggccggagataccgtggagaacatgctgcgccattgcgcggaaaacgcctctcatatcctagccgtgggttcgtgcgcgtacttcggctccatccaggccgcccgtcccaaccccaccggggccgtgggcatccgggacatcctgacggaccgcacggtcatcaacgtgcccggctgcccgcccatcggggacgtgattacggccgtcatcatgtacatccttacatttgaccgcgccccggaatgcgacctggagtcgcgcccgctgatggcatacggcacccgcatccacaataattgcccgcgccgcgcccatttcgacgccggacagttcgtcaacgtgtttgacgacgagaacgcgcgggaatgcttctgcctgtacaaggtgggctgcaagggcccggatacgttctctccctgccccatcgtcaaatggaatggcggcgtcagcttccccatccagtccggccacccgtgcatcggctgtacggagctgtacttctttgaccgcatgactccgttttacaagacgctgccgaacgtgaacggcttcggcgtggaagcctccgccaacatcatcggggctgtgggcgtagccggcgccggagcggcaatcgccgcccatgccgtgggctccgccattcattacaggaagcagcacatgaaggaggaagcaaacgtctccctgcccgccttcggggacgctcccggctcgcccgacaaggaaattgaagaatagccagaagccctcaccaccagattaccatgagcaattacacatcagcggacgttccggaatccagccgggtggtcattgacccggtaacgcgcatcgaaggccacctgcgggtggaaatggaggccggggacggcgtcatcaaaaatgcctggacgtccaccacgcagtaccgtggcattgaggtgatcgcctgcaagcgggacccccgggacgtttgggcttttgtggaacgcatctgcggcgtctgcacgggtacgcacgccatcgcggccctggctgcggtggaagacgcgctccagtacccggtgcccgtccaggcccgcctcatgcgcgacctggtcagcggagccctgggcatccaagaccacgtcatccatttttaccagctccaggccatggactgggtggacgtgatgtccgccctgaaggcggaccccgcggaaaccgccgccatcgccaagtccctttctgactggcccctgtcctccgccgcgtatttcgccggagtgcagaagaagctgaaggactccatcgcctacgggcagtattccatctttacgaacggctactggggccatccggcctacaagctgccgccggaggtgaatctgctgggcgtggcgcattatctccaggccctggtctggcagcgggacatgatcaaaatccacaccatcctgggcggcaagaacccgcacccgaacttcctggtcggcggcatggcctgcgccatcaacatgaacaatgaccaggccatcaaccagttttccctgagctacctgaagcagctggtgcaaacctgccacgatttcattcacaaagtatattatccggacattgtagccatcgccggattttataaggactacgcccacattggcgcgtccaaccccaattttttctgcaccggggctccgtctgaaatcaacacgggcgcccccgccggcaaaggcatgatcaagcccggcgtgcttctgaacggggattacaggaacgtgcttccctttgaccaggacaagatcagggaattcgtcaccagctcctggtacaggtatacggaaggcagggacgcgggcctggctccgtatgacggggagacgaatgcggactacaacggccccaggccgccctacaaatggctttccgaccacccgcagtacacctgggtgaaagccccgcgctatgacggccacgcgatggccgtgggcccgaacgcccgcatgatgattggctacgcccagggggttcccgccatcgtggaacgggtggatgccgcctgcgacaagctgggcctgccgcgcgacaacgctttcatgaactccacgctgggccgcgtatacggccgtgcgctggacgccctgatcaacgtggacatgatggtggaccagctccaggaaatgacggaccgcatcaggaacggggaaacctccaccttcaacccggaaaaatgggaaccggaaacctggccctcctcctgcaagggcgtgggctgggtggaagcgccccgcggcagcctgagccactgggtgcggattgaaaacggccagacggtgaattaccaggccgtagtccccagtacatggaacagttccggacgggacgcggcggggcagatggggccatatgaatattccctggcccataccgggaaacacccgctggtggacccctcccgcccggtggagcccctgcgcaccattcacagctatgacccgtgccaatcctgcgccgtccatttgtttgacgaagaaggggaggccattctgaccagacaggacccgtgaaaacgactcttatcgataacgacctcaccctggcggtggaggatgccattccggccagtccggtgtacgctccggaagaaatcctagctctggccgtgtgcgcctcccccaacggcagcagggacgcgggagacctggccctgctccatgccgcgcgggaacgcggcataaccctcccttacgcccagcaggaaaactcctgggaggctccctcccgggaaaggccgtacagcacggctgttctgaaagccgcagacaaggcggacgcctcccctttcatggtagcccgcggcaatctgaaggcgctggaaaaactgtgcgaagtcagctccctggaaaaggagcgcatgaacaaggcctttgaagagcattccccctccggctttgaacccgtggccgtggccgtccaccggtccggcgcgccgtggcgcctgttgggcgtcgtgcccatgcacgccatgagggacgtgcgccgcctctccatggccaaggccaatttccgctatttccacgtctgggactggcctctgcgcgtgctgcactggacgtgggtgctctgcatcatcggcctgtccgccacaggcatctgcatcgcggaagggtggttcctgaaaatgggggatctgcacggggctttccaattcggaacgctccgcttcgtgcattacgcgctggggtggattctggtggtggtgatgatgctgcgtttttcctgcttcttcatggcctccaacaaataccagagtttccgggccctgttccccgtttccagacaggagtggaaggatttgtacgccacagcggtggactacctgttcgcccgcagttatgacggcccccgctacatcggccacaatcccctgcagcagtggacatacacgggcgtgtacgtcctgttcaccaccatggtggtgaccgggctggccctgtatgccctgtatgagccgcgccactggttctaccgttggttcatgccgctgaacgacctgataggcattccgtacgtgcgcctggtgcatctgatcggcatgtggtgcttcatcatcttcgccatgatccacgtgtacctttccatcctttccgggaacgtggaccgggacggcaccatctcctccatgttcagcggcggacgatggctgcgcaagggcgtcaaattccgggatgaataacctctctgccctccccttgacatgaaattggagccatacacggaagaactgcggggctgccccgtgaagggaaatgcctatcccgtgctcgtgctgggcatcggaaacccgctcatgggggacgacggcgcaggcgtggagctggcccaccgcctccaggaacgggactacggcccgctggtccacgtggaggaagggggaacgcagggcatgaccctgcttcccctgctggaagatgcggacacgctcatcctgctggacgccgtcaggacgggggccctgccgggaaccgtcgtcacgcgcagccgggaagaactgccgcgccacttttcccgcgttatgtctccccaccagataggcatgaaggaagtgctgggggcggcccagctgtgcggcaccctgccgcgcgccatcacgctggtgggagtggaggccctgcatacggatttctgccgccccatgtccgcggaggtgcaggaagccttgccgaaggcgctggacacggcggaggccctcatcgcccgcgccctggcggaacatcaggcccggaaaaacgcccatgcatgaagtaggcatcatggaaggcgcgctggacatggcccggcggcttatggaaaaacgcggaggaaacaggctgaggcgcgtgcacatgaccatcggcagcctgagcggcgtggtgccggaagcccttcaatccgccttcctggccctgaaagactcgtatgcggcgcaggatgcagccctggacgtcgcctgggtggaggccgtgtgccgctgtgacgcatgccgggcggatttttcctttacggaacacggctacatctgccccagctgcggagaaccggccctggccatcctgcgcgggcgggaactggagctgacccgtgtggagtgggaatgaacagtgccccttccgggaaaaataagggaaatttacgcgaacactttccccggacggatggtctaataccattggagcgcatccatcgcgcctcaaacgtcaaaccaactatgtaaccagagccatgagcaatatcaacccattcattctaacagggatgatgccgctttcagcctcatccatgaaccgtgtctcctacatgtgcccggtcaccatcagcaatgatgtagtgcagggccagacggacattcaggattcccttaccgttgattccggcggaaatctttacatcatcaacgctcctgtttacgtgggcggccccaaccagccggaccacgggcaccgcaccgcccacctcgtcatccggaacggaggcgccatgacgctcctgggcaacctgccggaccatatgaccgttttcctgggggacaaagccaacggcagcctggaaatcaacggcggccgccttctgatgggccaggggcgcattcagggcaccagggagcatgaaggcagaatcgccatgacggacggctggctcttcgcctcggaagtggatctgccggcggagggctcggaactcgtgatcaggcacggcctgatgcgtatcagaaaactctccggcaatgcatccacccgcatttacggaggcgttctgcacgtaaaggaggaagcccgcgccagccgcatccatctgatagacgacggcgtgctgctgctgggcagcgtcaccagccagccttccgcggacgtcatggccggagcgggcatcaacttccgcggggacggcggagcgctggtaatccgcatcccccacccggaaaacgctctgacgcgcacgcgggaagcggaacatgtctttgacgaactgctccggaggggcaagctctttcatgacagtgaacccatgaccagcttccaggggttccatatgagggagttcacggggcatgacggactggcgtacgccgcgctgcgcccctccgcccagctgaacgcggaacagaatcaggttacccgcctgctccatacgttcatgtacggcggcagtgaaaaggacatgcccatctgaacccctccggcaaatggaaagccctcatcaaaaaaccgccggcattccgtaccggcggttttttcatctgttgatctgctgaaaaacggaaaaacgttatttcaggaatttaatcgtgaagggagccacataatcgtaattcccgttcgccgccttgacggcagcgataatggagaaaacgatccaggcgataaccaccacgggggcgagcacgaacccgatcaggatcaaacatgaaagacaggccgcaaccgtataaatcgcccaggaaatctgggcattcagaatattctttcctactttgtccaccagagggttggcatccttccagaccagccagcagatcaggggcggaataatgttcacgccggcggagcctccgaaaaagacggccaccagcggagaaaccgccgtcaggatagcctgcgttttatccgattgtttctcaggggcgggctcctgaaccggttcctggatgatttgttgttcttcgtccataaaaataaagagatggaaagcggatgaaggagaacggaaaccttttccgtttcattccgccttgatgagaccttttttacatattcctccccgtagtcaagcttccagaccgtccgccccctgaataaaaaacgttctccagcaatcatccttgccaccacgcaggccggaagccatactgccggtcatgaccaatgccctgacgctgctcgtcttctccgcctgtctgggagcctgcgccccgggaataccggaaatcccgcctcccgcttcttccgtcacccgccgtgaagccctggcagccagccgggcctatacctccatgatttggcggggctctctccggaatgtccgccacgggacggacggggacggcatccggacagacacgccggacgcctccgcagccggatatgatgccggagcatggtggaaaccgggcatgcgttccatcggcatgccgtacaaatggggcggcttcgacaccccgcgacagttctccgaacgcctgaaggcggatgccgccaacggagggcttcccgctgcggccggcgacatgggcaccccggaaaagcaggccgcgggagacgccgccgtcagccgctttgccgccggagtggactgctccggcttcgtctcccgctgctggcggctggacaggcccttttccacacgggaactccccgccctctgcacgcggcttccctcctgggaagacctccggacgggagacatcctgattgtgccggggcgccatgtgctcctgttcatccaatgggagggaacggaaaagaacaggttcctgggcagtgaagccggccccctgccggcctggaaatgttcggagcatgtgttcagccgcgccatgctggaaaacagcggttaccgccccatgagatacaggggcatgcgggactgaaaacaggttccggaacatccgtgcccctctttctttcccggaacaggaataagggggaagacatcgggaaacattccggaagttctcctctccccccttccataaaaagaaacccggcatcccatgcggcagggatgccgggctgcaggccgccccgtcaaaggcggcggcctagtcaaatgccgggaattacaacggctgtacgttcatatggaacaccttcccctggaaggaggagccaagttccttcagaggcagaatgaacgtggaacggtgaactttgggacgatgcttgaatttgtccgaaaaatccttggacttgtcggaaaaattcttcagcacggcagttccggcaggttccccgtcaagcaacaggctggttttctccggttctcccacaatttccaccttgaccttcttgcccacgggcagcttggcgccgaaggaaaattccagagaatcgtcacggcggaatccgacggtgccgtccttcatgaccgcaagcaattcgccctcaggcgcagcaagcagcacctgctccttcccttccggagcggcagtcaattccagttccatggtcaggcggtaattcggccccagggcaggtttgtccagcttctgggggagggaggaaggctccaccgtaaagggctggctgtctttccatttgtgcaggggattggtgcgcggagcgttgccgatggaggaaaccagctcgcgatgctgttcaaacgtatccggagccttggcggttccccacagtttctggctgagcacgtccatggaaccggaaatgatcccccaaatgtcataaggcgcgtaccccgtatgcataatgtccgtttcatcattccagacggcgaaggtgcctccgaggagctggggatgcccggaaggcagcgtttcattgccgatgcggttgggaatccagttattgtacagccccttatggtttctgtccatccggtagtagccggcaaagggaacgatataaagggctccatcgttcgtattgatcacatcatagccctggttgacggcttcccatgctttcatccagccggtgctccaaaggttcatctggacccctttgctgaccaccggagtcttgcccggcttggcgctgaggcttccccagatgcggggcgtataaccgcgcttgagggcatggctgagcacggcgtttgcaaagtggcggtaatcttccttgtccccataaaattcatccgcccccacatgcaccacgccgcagtccgcgaacacgggacggcccagcttgggatccttcagcatgtattcgtcaaaaaccttgctcaccaggtcgatcgtttccgggttggcggcgtccagcatctcgcagcggcgcttctcatgattcatgggccctttataaatgagatcgggccgcaggcgcgtaaaggaaagggcatgccccggcgtgtcgaactccggaacaatattgacgccgtacttcctggcatagctgaccaggtcggcaaattccttcttggtataaaaaagatccttggctgtcaggggcgttccgtcctttcccttcattttggattccaggcggaaagccgcatagctttccttgaacggatcatggccgttgtccacatagtgttcgtggaaaatatagttgttgttgatgaccaggtgcaggtcattcatcttgtaccaggccatggtgcggatcacgtccttcaggaaactgagggggtaaggcgtgcgcgcgacatcaagcatgaacccgcggagctggtagcgcggaaaatccacggccgtgccgcagggcacgctgccgggcgtctggcggagcatctgcagcagggtgcgcgtaccccagaacaggccggtgggagccgccgcaccaaggcggacgccgtccctggtaatctggagccggtatccttccctgcccagattgccgcccttcaacagggaaagggaaatatccgccttcgccccgggggcgacaagcttgaccttcttccccagcacgtcttccatatccgccgcaaacaatttgcccagctccttgtccgggcatgctatggtgaccgtattccccagcttatattctccctgtccccccttccattgcaggatttccgggataatccgcggcttggggttgccctgggcggcctgaggagcctgcagcatgatttcataatccttgctgacggcttccttgccgtccttggtcaccttgaagctgacgttgacgggggtatctgaaataacaggggctatcttgcctttgctgttgacgagctgctcatagtcggcccccagcaatttaatctgggctccggaaacgctcggcatgggcagttgcttcgctccggctttcaccggagggatggaaagggaatccgcaatctgcttggcgtcctgccccatcacgggagacgcggcaagaacggcgatcatcaggaataggtttttcttcatgttttagtcttgtttaggaaaaggaaatgtctgatttgctccaaaaactacgcgcccgccgcccctttcttgcagagaaagggagaaaagcggaagaattctccctctctcaaccgggcgggacggacattccgcccaaacggattgccgcgcgccgggcttcatgaaggaaaaccgccggccaagagaggctttccctcctgttccaataaattattatcccaaagaacccgttgttggcgagataaaaaacgtggagccccgggctgcagggaaaaaagatgccgcacgacggcaaaacgcccccccacggcaaaaaacgggaaccggccgtccctattagggcggcccattccggacaaaaaataaaatcaggcgcggatatcaatcacctctccggcgggaaagcgcaccttggcctcgcgggcataagcgtcatccttggcgcggtagcccagagccacccccaccacagagcggtacggcgtaccgtccaggcccaggatttcatcatacttggcgcggtccatgccgccgatcgtgcaggaatccacccgcagggcggcggcggcgctgagcaggaaccccacggcaatgtacacctggcaatccagccaggcatgcatcttttccggagccagagcctccacgtagctggtataaaagtcggcggaggaagccagtttttcagcggagggtcggcgcgtgaattcaatctgggccaggtaacggtccacatcccgcctggtggcgtcgcgccgggagcacagcaccacgtaatgggaacagtcctccacctgggactggttccaggaaacctcccgcaggcgagccttcagttccctgttggtcacgacgacaaacttccagagctgaagccccagggaggagggactgagacgcaggctttccgccagcgcatgccaggtgggctgttcaagacgggcttcaggatcaaattttttgcaggcgtaacgccattccagaccgtcaacatactgttccggggagatcatcatgcagggtgagacacgaaaaacggaaaaactgtttaaagaacctctttcaatacctcaatgcagcgggcgttctccgcaggagtgcccacgctgatgcgtatccattccggcaggccgtaaccgtcctgcgcgcggacgatgactcccctggcaagcatatcctggaacacctgcttgccccggcccactttcaccaggataaagttgccctggctgggaatccattccaggcccatttcccggaaagcctgctcataaaaacgcatgccttccttattattctccacagtgcggcgcacatgctcccggtcctccagggcggccagggcggcctcctgggccagaacatgcaggttgaacggagcacgcgccttgtgcagcatgctgcaaaccggttccggcgcaatgccgtagcccacgcgcagccccgccaggccgtaagccttggagaaggtgcgcagaacaaccacgttgcggccttctcgcacaaatttgagggtatccggaggattgtcggaaaactcccggtacgcctcgtcaaagaccaccagcacatgttccgggaccttcgccatgaaatcgtctatttcctgctgtcccactacggtgcctacgggattggtgggattcgtaatgaacacgacgcgcgtattctccgtaatagcggccaggaagccgtccaggtcatgcgtccagtcctccttgttgggcacttccacgtacgcggcgccaaacagcttggacatgatagggtacatggaaaaggcgtgtttggcggccaccacctccgcacggggattcagcagggcatggcagatcagttcaatcacttcgctgctgcccgtgcccactaccgtctggccgaactccacgccgcagaactccgcaatagcggaacgcaggcggaaagccgctccgtccggataaatgttcacgccggcagccgcacgggcaatcgcctccaccgccttcggggacggccccagaggattttcattagacgccagtttcacaatatcatggggattcaggcccagttcccgggccgtctcctcaatcggcttgcccggctgataagccaccaactccagcacatgctgatttgcgaaactctcaatactcatagcggcggaatgttaccgccattccccgtttctggcaatacggatttccatccggccggcccctgggaagatgacagccgtttagagaatctgcgctggcggaaaagtggaaaccttttccggaatttttccattcttcctgcaacgcccttctaccggagaaaggcagccgtccactttctccggcagatttccgcctgcttttcatgacggaccgcccaaatatgaaggagcacagccccggaattcttcaatgccccataaggtcaaaaacatttcccttaaaaagcgggacggcattccgtgacggacggtaaaccggccccctgccctcctattttttacggctgcggcccctgcgcgggcggctgcgcagggtctggtacccggccacgacaaaggcgaacgcagtcaccgccagaaaggaacggaacagccaggccagaagttcccagtaaatctcctgagtcatgcggaaggttttttaccggaatcgggaacgttccccaaatcttcccggaggcgtttgacggcacaggcaatcagggtggctttatccagctggcagcgttccatgttcagcgcgtccgcttccgcatcccggaaaaaatggaccgataacggcattttccccttgatttgaatttttttctgactcttttttttattttccgtcttcataaaaatcctttttttggtgcaataacggccttaacagcccttttgcgcccctacaatgcacctgaaacggtatttcagtcaacaaaaatataccattaaaatgactttatgcaaaaaaggttgaaaaatagcaccattttcgttacaaagggtgcatgagtgagaatcaggacgaactcaaagtgcagatcaaggcttggctgaaacagcagaacatttcccgcaatgattttgcggcggaatgcttcgtgtctcccaacacggtccgcaactggcttgccaaggtggccatccccaaagacaaggaagctctcatccggctcatgatggaaaaaacggaaagggagaaaaaactgaaagaggcggcaagagccaattggaagccctttgtcgtcatgctgagttccgaggattacaaactcatcgaagaagccgccagaagggacaacatgacggtggaggaatgggcggaagccaccctgatcaaggatgcccagaagaggatgaaaaattattacgacgacagcagccttccggaagatgtatccctggcggcggaagtaccggaggaatacggagctcccagacgttccggcccttcatcatctccgccctcttctgcccgccgcaagccgcggcaataaatcctggagggcatggcatcccgctgatgtcccgcctgcctgccggcttccgccagcgtgctgttccgcggagggcttccccaggcgccgggaacaccgatctcctttgttgtgcgccgaatcaacttttctcttgctttccgttctccaaaagttctatttacgttgactgtgagtcaattattttatctactgctttttcccgccttttgtttcccgctttcggcccgcgcgaaagcggttccgccgtctgttcccgccgtctccgtcaggatggtgcatccggacagccaggagctggaccgggaaaggagccctgttccggaaggatacacgccttatacatacgaattccgcgaccgccatggaaaaatgcagcgggaacggctgttcctgaaaaatacccccatcatcacggaatcggaagtggaacaggcaagaattgagccggagagaagagaatgcctccacatcaccctgaatacacagggcggaaaaaccatgaaagcggcaacctccgccatgaatctgggccgcgacaggctggccctcgtcgttcagggaaaaatcaagtcggcccccgtggtgcaggccgtcatatcccgtacttttgaaatctccggactggacggaaaaaatgaagcctccggactggcggaactgctcaaccggcaggcacccacagaaaaaaacacacccttcattccacaggatctggccctgtacgccgtccatccggaaagccgccgtctggtggaagaaggagtcctacgcgtaccgggcttcaggctctggaagctcccggcgcaccggcaggaaaaaacgggagaggaagaatatctgttcctggggaattctcccatcatttccggagactgcgccagacatgcggagccagatatggaacatccgggaagcctggacatcacctggaacgaagaagcattccgtaaactggagcgggcatcggccgaactacgccccggcaaggacaggattgctgtcgttctgcgcggaaccattctgtccacccccttattccagggaatgccttcccgcaccactcttattcccggtctgggggatgacagccggctggatgccctgtgccgggccatcaacaacacccttctgccgctgacggaacagcaaaaacggcatgtgagggaaaacgtggctctttatcccatccatccgcgcagccgggaattggaacagcattttcttccggaacttctgcagggaaaatccatccgcctgaaaagcggattccgttccatcccctatacctgccccgatttcccgaaccccgtccggacctatgtcttcatccgcccggaatccctcattgggccggaggacattcaggaggtggaacgcgaccaggatggaacaatctcctgccaacttctgcccggggcatgggaaaaagcgtttgctttcatgaaggcaaaccctgcgggccaggtggaggcggcagttgttttccgggggaacatgcgcctccggtttgaaatcaaaagattctcccttcaactgtgggggatgcctgtgctggattccatccagccaaattctttcatttaccttcctgagccggaagaagagcaacggatgtaccgggagtcctttcacctggcaatctacggcttcctggaacccgtttgcccgtggttctttaaaagctctcccgtgttccgggcatggggttcccggcgtccctttctgatgattgactcatccctgaaaggcccctgattaaaggaatcgtttcgtcgcacgcgccatgctgcgcttgccgccggccggtatttttcacatgggccagatacggcagaaggaacggggcaaaacgtttcagggcaaaataaaacaggacgatggccgcaaacaccagcaacggcgtgaagaaggcgaacaggctggatttcatggcgggaggcaggaaaccgtaaatgggccagtgcagcatgaacgtcagaaagcaggcgggagccagcaaagctattttcgcagacaggccgggcaggtgcttttccatccagatgcctgcgtacatgatcatcatgacacccagaagcatgccaatggccgtctctttccacagggggatcactccggcggaatacagcgctatcagtacaacgggcataaaaatgcttacccagaaaaaaatgccgaattttttattcatcaacagatgaatgtcgtcaatccgccgggaactgagcgcaacgcccagcaggtaaaaagcacaggttccaatggaaatcgtctccgtgtggtccggggccgtgttgaagaaacagaaaaagaggagcaccgcaggaaacagcaggattttgacgcggaccagaagaggcgtcagcaacgtgagaatgataatgtccctcaggaaccaggaagggccgatggggggaacggcatgggagtcatctgcggagaaaaggttcatgcccggaagaaagacgtcccggataccaattaaattctcaaggcggaaggaagcgccgtcatgaggcaggacaaggaacacgtacagtacattccagaacatgaacggaataaacagccagaaagcccggttaaaagccttgttccaggtgatgttcctgcccaggaagtaccctgccagcaccaggaaaaacgaaaccctccccaggtaaaagagatggaggctcaccgcctggagaaagggggaggacaggtggacgtacatgatcagaagggctgcaataacccttgatacgtcaatccataagacacgttttgatgggggggggggggggggtaagcgtgtcaagaatcggaggctggttttgggagttatacacttaagcggggaaaaagtaatgcaggcgggtgtcaaagtcaagtatccggaaccttttcgggcatgggctccgcatgggggcatccctgatttttttgctcgaaccggattcggagcttcgctatattggctcccgttatggcaacaccggattttcattatcaggatccttttcccatggaaaaggacgacacccaataccgtctcatcacgtcagactatgtgagcgtaggcgactttgaaggacaccccatgctgaaagtggaaccggagggactgcgcctgctggcagcggaagccttccatgacgtggcctttttcctgcgccccgcccacctgaagcaggtggccgccattctggacgatccggaagccagcgacaatgataaaagcgtggccctgacgatgctccgcaacgcggaagtggcgtccgccggcatcctgcccttctgccaggacacaggaaccgccaccatcgtaggcaaaaagggccagcaggtatggaccggctgtgacgactgcgaacagctttcccacggcgtttacgacgcctatacccagaacaacctgcgctattcccagacggtggcgctggatatgtacacggagaaaaacaccggcaccaaccttcccgcccaaattgacctggaagcggtggagggcatgaaatactccttcctgttcgtcgccaagggcggcggctccgccaacaaaacttacctttaccaggaaacgaaggccctgctcaacccggccacgctgaaaaagttcctggtggaaaagatgagtactctgggcacggcggcctgccctccctatcacatcgctttcgtcattggcggaacctctgcggaaaaatgcctgaagaccgtgaagatggcttccacgaagtactacgacaatctgccgactacggggaacgaacacggccgtgccttccgtgacctggaactggaaaaggaactgcatgaagaagcgtgcaaactgggcctgggcgcccagttcggcggcaagtggtacgctctggacgtgcgcgttatccggctgccccgccacggcgcctcctgcccggttggcctgggagtctcctgctctgcggaccgcaacgcgaaagccaagatcacgccggagggcatctttattgaacagctggaaaccaaccccggccagtatattccggaagccctgcgcatgacctccagcgaagctgtctccattgacctgaaccgcccgatgaaggaagttctgaaagaactgggcaagtaccccgtcaccacgcgcctgagcctgaacggcaccatcattgtggcgcgcgacatcgcccacgccaagctgaaggaacgcctggaaaagggcgaagggctgcctcagtatatgaaggatcaccccgtgtactacgccggcccggccaaaactcctgaaggctacccctccggttccttcggccccacgaccgcaggccgcatggattcctacgtagacctgttccaggaaaacggaggctccatgatcatgattgccaagggcaaccgcagccagcaggtaacggatgcctgccggaagcacggcggcttttacctgggctccatcggcggcccggccgccattctggccaagaacaacatcaaaaaagtggaactgctggaatacccggaactgggcatggaagccatctggaaaattgaagtggaagatttccccgccttcattctggtagatgacaagggcaacgatttcttcgcgaaaatccgcgaaggatgggcctgcgccggttgcgggcattaagcctgaaccgggaaaaagatgattcactgccggagcctttcggggctccggcttttttatgccccgggttcagccctcccagtacagacggaacgaatatccgggaggaaacttccggaatgcctcgtgcgccccttcacgcaaacaggtaataaaccagcatcagcgccagattggcgccggcagccagcatcaccccgcccggcttcaaatacggcgcctttccaagaaaggccgccagtaccgcaaagacggagtacagggatatccacatcagaaaaaatgctgtcaggttccgcccgttcccctgcccgtccaggggcatgttccctccggggaaaaggaacggcaacgccggaaacacggcgtaaatgacatatacccagttcttcactatcatcctgaaagaaaccgtcagcggttccctgccaaacaggatattacgggagcaggcgttccgcgtcttttccttccgcagagcgcagggcaaatagaagggaagaagcatcagcgccaggacggggcctgcatataaaatagcggccattcccgctacgaaagcgaagaaagcgacaataaggacaggcacgcctgccatgagcaggaaaagaaaggctgtcctgcgctccgccttctcccccattttcaggaaagaccatgaaagataagccatagggtaaaaatatggttttttaaagtttgccagaaacaggggtcgtgcgcaagggaaagccgcccacggagcatccggagcagcgaagccccgtccctccgcacgcggcaggataggaaccagacagactctgattgggattgccccgcacccgcgcccacgttatcctgtcctcatggtctaccgaatttgcaaatccatcgaactggaaaacgggcatctcctgtccaaacatcccggcaattgcaaattcccgcatggccatacgcgctccgtggaaatggtgttccgggcggaaacgctggatgccaatgacatggtgttggatttcaaggccgtcaagcaaatgatgggggatttcctccagcagtttgaccactccctgtgcgtgaatacggaggaccccaattacgctgccttcgtggccgcatacggggagcgcatcattcccttcgaccgggaagaccccaccagcgaggtgatggcacgcgtcattttcaatgctgcccggcacgcgctggaaaaagccagggagaaccccggcgaatatcccgtgcgggcctgtgttgagctggaacgcgtgcgcgtgtgggaaaccagcagctcctgggcggaatatggggaataactgaaacagcgcgcttcccgccgggaggaacgctctgcaaagattcccggccccgcggaaggcacggccgcaatgcagccaccccggtgttcatcccttaaaagggattcaggcatatcatgcgcttctgcgtccagtgcccgtaggtggaagaatacacatccgtaatttcccgggcccattcgtcaatagtgcgctgatgatgggcgtattttttaaaatctttggtgtccacgcccagcagggagctgtggtcttcctcataatccgcaaattcggagacgatgcggccggactcatccctcaggcgtcccgccatggcaatgtgccctttcttgatgaaccgcttaaccagccctccccccttgatgccgctcagcgccgtgacaaagatgccggccctggcatttgtgggagtgatggaaatgatggcgagttccagcgtataagcccccttggttcccggaggcaccatttcaaaatgcggattttcggcaacctccttttccatgctggttgcaacgctcttctggaagtattccgccaggctgcgcagggcatcaaacccttccgcagtatccggcctcacatccatgtgcactgtatccaccggaacgacggccatcaggacttttttcccattcacgccgttcacccggtcattccagatttttttatcatcggcattccagtacgcgtcaaagggaatatgggaatccttattttttacctgatgagtgataaatcctgtttggggaacatgtttgaaattattggaacaagacactaccgccatgcagccaagcagcacaagggccatcagggaagccgggaataaaaaacggtgtttcttcatatcaagtaacaggcagaatcgtttttatcatggcccggcaccagctgtcaataaaacctgcgggtgaaaatcccgggctggggctctcctgccgggcagaaagagccaaggcgggaattcctagtcttcttcatccatggggcggtatttcacggccagtttttccaggattttcagggccctggaggcacggctgcggaaggatttgtagtcccgggggtcgcagtcgctccaggcgcgttcggacagggccagggcgcgcggccatgccatgtattccaccagccccatattgtacaggtattccgtccagatgttagcctgaaggccgcgcaccctggcggcttcctccggggagagttccggcaattcatagccgtacacctgcttgagcggaataaggcccccgacggctttcggctccgtggatgcggcagactggtaatagtcaaaatagaagtgggaacacggcgccagaatgacgggatgccctttcctggctgccgccgcagcaaagccgttgccgcgccacgccataacgaggatgtgtttgtccgcctccagttccccggcttcatcccagacgatggcgtcataaccgtccttccgcacgtagtccgcaatctgctgcaggaaatcccggcccagggccttgagatccttctccctcaggttctttaaacggttctggcaataccggcattttttccatgcctcggcagacacctcgtcatggcccaaatggataggggagccgggcggaaaaacggccttgagttcatccactacgtctttcacgaagcggagcgtttccgggcgccccatgcagacggcatcccgtccttttttcccctccacgggaaaatccacaccgtcgcaaatcaaatccccgtaggcatgcatggccgcataggaatggccgggaaggtctatttccggaacaacggtaacctggcggctgcgcgcatagtcaataatctccttcatctgctcctgggtgtaaaaaccgccataggtagcttccgggtcatgctcctggatggcgagtttcacttcctgccagttccattctccgtcagcgagcggaacgcgccaggcgctcatggaggtaagcaatggatattttttaatttccaggcgccagccgggaccgtccgtcaggtgcaggtggaggcggttaagcttgaacagggacatggtgtcaaccatgcgcttgacttccgccatggtaaagaagtggcgggaaacatccagcatcaggccccgccattcaaagcggggatcatcccggagggaaaaaacgggtacggaaaacccctccccggtccggttagcgcttaaaatctggaccatgctctgccacgcgtagaaaaggccctggggcgccgccgctttcagatgcaggatgcccctcccttccacgtcacgcttcaggcgggcctcatatccttcgcctgtccccgagggggttccctcaaccgaacagacggcatccgcagaggctttgtcacgggttatggagaggccggacaaaacgccctgggcattgagcacattcaggagagcttccactacaggaacatccttttccggcgcatagaccgccagccgcaacgggagatgcgccacggcggcccggtcagacctgcatgcggaaggcgcggggagcagcacctcctcggccggcagcatttccgccatgccggcgcccggtaatccggacagggccagccatgctgccagacggaaacaacaccccttattcatcatcccggaagtacggcccaccctggtctcttctttcaatggaaggagctttccctcagacccctgtgtcccggaaggcaaaggcgcggccatattcagccgcgcctgccggattccgtccttttttacattcacctgcgtccgccaaaaaggccaccaaggccgccccccaatccacccaggcccttcaggccgcccaaccctccgcccatgccgggaaggccgggcatcttgccccccttccctttcatggaagccatctgcttcatcatggcgcccattttgcccttgccggacatcatcttgcgcatttcggaaaaattcttgatcagcttgttcacctccatcagaggacggccgcagcccgcggcaatacggcggcggcgggacggattcaacaggttgggattgctcctttcctttgccgtcatggagagcacaatggcttccatgtgcttcatccgcttggggtccagggcgccttccggaagctgtttcttgattttgccgaagccggggagcaggcccagcagtccttccagcggtcccaggttctgcatcatcttcatctggtccagaaagtcgttgaaatcaaatttgccggacatcatgcggtccatggatttggcagcctgctcttcgtcaatgcgggcggcggcatgctccaccagcccgacaatgtcgcccatgcccagaatgcgatccgccatgcggccggggacgaaggggccgaactgatccagcttttccccctcaccggaaaatttgatgggcttgcccgttacggaacgcatggaaagagccgcgcccccgcgggcatcgccgtccagcttggtcaggacgatgcccgtcacgttcacggcacggtcaaaggtctgggccacattcacggcctgctgtcccgtggcggcatccgccaccaggagcgtttccctcggcgaaaggaaggcgtgcagctggcgcagctcgtctatcagggcttcatccacctcctgacgtcccgccgtgtcaaaaatcatgacggttccgttctgggtccgggcccattccagagcctcgcgcgccacggccaccacgtccctgctgcctggtgctggcttataaacgggcactcctatttgttccgccagcgtcgccagctggtccacggcggcggggcgcaccaggtcgcaggccaccagcagggggaggcgcccctcgttcttcaggcggagggccagcttcgcgctggtcgtggtcttgccggcgccgttcagccccaccaccatgattctggcagggtccgtcagatccagccccacggcgtccccgcccagcagggcggcgatttcatcacggaaaattttgacgatttgctctccgggcttgatggatttgagcacttcctgccccatcgcccgttccttcacgcggccgatgaattcccgggccacgccaaactccacgtccgcctccagcaaagccagccggatgtcgcgcagggcgtctgcaatatttttctcggaaattttgcccaggccgcgcagcctccggaacgtgttatccagtttatctgctaaaagtgaaaacataatcgtatgatgcgccagactgtgccacatttcccccttcccgtcaacaagcgcgccctgcatgggacatgatgcttgacttgccgggggcttcgccccatcttttcccgcatggcaccctttgacctgaaagaggaaatcttacgcctgaaagaagaacgcaacgccatcatcctggcgcacagctaccagaccggggatatccaggacatggccgactacgtgggcgattccctggggctggcctacaaggcgcagaatacggattgcgacgtgatcgccttctgcggcgtccatttcatggcggaaaccgccaaaattcttaatccggacaaaaccgtcatccttccggatgctgatgccggctgttccctggaagcctcctgcgatgccggggaactggaagccttcttaaaggaaaacgcccataagaattactatgtagtggcgtatgtgaactgctccatcggcgtcaaggctctggcggacgtaatcgtcacctccgggaatgccgtaaaaatcgtctcccaggctccggaggaccgccccatcctgttcgtcccggaccagaatctgggtgcatgggtaagccgccagcttggccgccccctggaactgtggaacggggcctgccacgtgcacatggagttcacgcgggaccagattcttgccctgaaggaaaaacaccccggcgtgccggtagtggcccatccggaatgcacggaagccgtgcgcctgctggcggaccatatctgctccacggaaaaaatgatcccctattgcacggaaaaccccgccaaatctttcatcattgtgacggaatccggcattctgcaccgtctccgcaagctggtgccgggaaaagaattcattcccgcgcccacggagcaatgctcctgcagcacctgcccgtacatgaaaatgaacacgctggaaaaactgtacctgacccttcgggacctttctcccgccgtggaactgccggaagacctgcgcagaagggcggaagccccgctgctgcgcatgctggagcaatcccaatcctgacctctgccttccccgcatgatacgcctttcagaccacatcgcggccgctggcggctggctctccctggaagctttcatgcagctggccctgcaccacccgcaggaagggtactactcctcttccattgaaaacatcggtcaacgcggggatttttccaccacccccacgctttcccccatcctcgcaaaagccattgtcgcgcactggaaagaagcctgctcccgctgcggcaggcggctgcctctgctggaaataggcgccggctccggtgccctggccgttaaaatcctggagcagctgggattctggaaccgcctgaatacggattacgtgattgtggaatcttccccacgtctgcgcgaattccagcaccttctgctgggaggccgcgctaaaatttactccaccatggaaaaagcgctgaaacactgcggaggcaaggcctttattttctccaacgagctggtggatgccttcccggcgcgcgtatttgaatacacggaacaggactggaaagaagtggggcttgtcgtgaaaaacggagccgtccgggaagaactgcgccccgtccggcagcagccgcttttctcccatatgctggaatacggctcccagccggggcagcgggtggaaattcacgactcctacgcgcgctggtttacgagctggcttcccctctggaacatgggcgtcatgacggtcatcgactacggggatgaaatggagcggctgtactatcgccgcccccggggttccctgcgcgggtacaaaagccaccaggtgctgacgggggaggaactgtaccgtaaccccggcctcacggatttgacctgtgacgtcaattttacggacctgctggaactatcccgcaactgtctgggggaccgggtcactttcatgacccagcgggactacctgctcccccatgcggaaaacacgccgcaggatgcctttctaacggatgaatacggtgccggaggacacttccacgtactaattcaggaacgccagcggctgcaaccggaaggttcccagtaatccaggaaaccgtacttggcaatgccggacgaaacctaagcaggccccgtccgacagcgacggccccatctttctccgagaaagagaaaaacattgattacaggaattagactgatgcccggaagggatggcatcctgtcaagggctcagcatgagaggaaaacattttctaacaaacagacaacattgatgtctattaagggaatgcactgagcgtaagaattataatattattttctcatggaataaattctcatgttcttaaaataacagaaattttttcaaataaattcttattgacgctaaatctgaataatgctattgggaaaatgcccgctgaggattgccctcatcttgttttattcattaatctcagctttttaatacctgatgaatccgcctcatcgttctgccgttcccgcttaccggaaatggtactttggagccggcggcagcctcggcaggcggggcatggaggcagctccggagcccgatccgctgccgtttgaagcgatccggatccatgaggaaaggaacgtggggccgccgagcacgtcggcggacggatacagcgcgcacgggacattcaccatcccggaaggagcggagggcaaaaagctctacggcacctgctcgctcttccttggggtggacgactggggaatcctggaagtaaaggactccggcggcaaggtggtggcgcaggtggacctgaaggaaaacccgcagacggcgggcgagcagggcgggcacaaataccacacggggaccggcggggcgcagctcccctccggcacctacagctgggaagtcagccagaccaacatcgactacaatccggcaagcggcaacacctccatctgcaactacagcatcgacgtggtgccgacggaaccggggggcaggaaagaacccgaaccgtgtccctgcgagggagacacgtgcgacaacagcggcggaacgccgccttcccggtcgctggcccggtcgggccctgaggcgggcatggaaagcggcgccctgggaaactacagctcggcggggtgcagcgtgacggcggaaagcacggccacgctgatgtactggtcctgcaacttcggagcgttccgtggacttgggggccttccggccggaagggtggaactgaggggtgaagaaaacgtctccggcctggaaagaccctcctcactggcctacaaccatcccctgaacagccgtctggacgtgccggaagggggcattgtccccggagcacggtttaatctggtgcagggagaccgggtaattgccatgcgctgctacacggacgggtccgtgctgcccatcggggtggacacgtcgggcggagggcgtgcggcgctggccacggtggaaggacaatcctgcctgcgctgggtggtggaagacggcagccaatacctcttctcggcggaaacgggaacgctcctctcctacaccaccacggacaggcaggtcatctccaacgcgtcatcctatctggacgtcaggcatgccggagacggctcgctgaggcaaatctggaacctgtgggacggcctgctcaacgtggaaaacgtcacctccacgggttacgtcatcgcgctctatacccctgggcaaatcaccggaacggacggacagggattttataccgttacgggcgctcccttgaaaacatttattctttccctggatgctgaggaaaagttcaccatcacggaacaggcgcctgccaggcagccctacgccgtcacctggtggaacgacggcctggcgtggaacatgcggcagggcacgggggaagacgccctcacgaccctccgcacgcgcacggagctggaaccggaaaactcggtctggcagctggtcacggaaatctccaaaaacggaatcgtggcggcgcgcacctgcgccatctaccagaccacggacgtgggcgacctgctgctcacgctggcggaaggctacggaagcccggaggagcaaaccacgcaatacgcctacgaccagtgcgggcggctcagaacggaaacggccccggacggcagccagactcattacgcctatgacctctacggccgcctgctcagccgggacgaaccgtgggcggaaagcggcaggcgcatcacgcgctacacctacgcctgttcgggagaagccgacttcagcaacgaacccgccacggaaacggcagacctgcttccgctggaaggacatgtcaaaacgctgacatccaccacctggaaatacacgacggccaaccacatcaaaagaacggaacggcgggtcacgggcctgggtgtggcgggcacgcgcctgacggcggaggaacaatggctggccggagccgccaacatccatgcccgcggacgcacacggttcagccgggacctcgacggcgtgcaaacgtggcacgactacgcggccacgacggagcacggcgccctctacacggaaacggtggaaacgcgcatcaacggagaagccgtgccgggacaaagcacgcgcgccgtcacctggatcacggcggaagggcagcgcgtcagggaagaaaactacctcctgctttccaccgggcaatgggcgctcacgggcagcgccgtctacgaatttgacacgcagaaccggtgggtgaagcggacggcgggcaacggccggctcacagagcgcgaactgatgtgcgacggaggcctgctgtgggaaatcgatgaaaacggcatcaggacggactacgcctacgacacggcgcgccaactggtggaagtcacgcgttccgccgtgatggacggggaaaccgtcatcacgccggaaaccatcaccacctacgcccgggatgcggcaggacgcgtactctccacgcgtcaagacacgggggcgatgactacccaagaaagcacggagtacgacttgctggggagaatgacttcctctacggacgtcctgggccgggtcactacctacgcctacagccaggacggcttgacggtcacgcaaaccgtcccttccggggctacattcatcacgcgcagcgcgccggacggaacggtgatggaagaatccggcacggggcagcggcacgtcatctacgccatcgacctggtcagcgacggtgtgcggaccttcacgaaagccgtctccggggaaacgcaaaccgagctgcagcgcagcattgtcaacggagccggggaaaccctgcgcacgggcgtccccaacaccgtcggcggagtcatttacacgaggaacacctacaacgccagggggcagctcaccaaaacgcagacggacgcgggcaatgcggccacgacgatggacccgaccctgtgggaatacgacgccttcggcaacaaaacgaaagaaacctggaaactcgccgatccggctacggtgtccaactcgcgcatcaccacgtggagctacggcgtggaacaggcccgggatgaagtataccgcgtcgtcacggcgaccaggaacaacagccggggaacgacctacgacgaaacgcagaaaacgctggcttcctccctctcgtccacgctggaaagcaaagtcatttccatcgaccccaggggaaacgcttccgaacaatggagcgaatacggtccgggcgccgtccggacgcagaaaagcagcatccccacctccgacatcacggccgccgctacggtcatcgacggttttatcatctcgcaaacggaccatgcgggcgtcacggccacgcatacccgcgcctacacggaaaccggcgtcatctacgccagcacggacggccggggcaacacggtcacgacgcacaccgaccttgccgggcgcacgatctcggtgacggacgcggcgggcaacacgacttctaccgcctacggcccctggtttgaccagcctgccgtcgtcaccaacgccctgggcaacacgacctgctacggctacgacctccggggccgcaacacggcgcaatggggaacgggggcccagcccctgctcttcggctatgacgaggcggacaggatgataagcctcaccacgttccgggaggacgcgggcgacatcaccgccgaccccacgggacgcacggacggggacgtcactacgtggagctacgatgacgccacgggcctgctcatccgcaaaacctgggcggacggcacccatgaagacaccgcctacaatgccctgaacttcaaatccacgctcatggacgcgcggggggtggtcaccacctggggctacaacctgaagaagggggtcaacaactccgtctcctacagcgactccacgcccggcatccagtacgcctacaaccacctcaaccagctgacccaggtcacggacgcctccggctcgcgcgtcctcacgtacaccccctgcaacgaaccggacaccgacagcatcaccatcggagggagctcttaccagctccaggaacactacgacacttacggacgctcctccggctataccctgaaacagggaaccgacgtcctccaggaagccagccagggctatgaaaccgacggaaggctggccagcgccggaatcaggcacgggggaacggagcaaagcttcgcctacggctacctggcaggaagcagcctgctctccagccttgcgatgcccgacggcatcgtccgggaacttgcctacgaacagcggcgtaatctgatcaccgggatagactgccgcctgggggaaaccgtgctcgtctcccggacccagagctgcgatgccctgggacgcccggtcacccgcacccagcagcgtggaacggaacccgcccgcagcgacagcttcagctacaacggcagaaacgaactcaccggggctaccctgggcgccgccccctacggctacagctacgacaacatcggcaaccgcaagacggcacgggaaccggccgaggaactcgcctacgcggccaacgggctcaaccagtacaccggcattgaagaaagcggggaagcgccttttgtgccgacgtacgacgcctcgggcaaccagaccctcatcaagacgtcaacgggcatctggacggccatgtacaacgcggccaaccgcgcggtgagcttcaccagccggaatggaaacacgattattgagtgcggctacgattaccagggacgccgctacatgaagaaagtgacccaaaacggcacggtcgccagccacgaacgctatctataccgcggctatttacaaatagcggcattggatatgctggacaaccggaacgtgcttcggacactgctgtgggatcctctggaaccggtggccacccgccccctggccctcgtgcagggcgcttccctgtactgctacggcgtggacttcaacaagaatgtgacggaggtcttcgacgcacagggaacgatcgcggcggcttacgattactccccctatggaacagccacccgcaccggaagactcgtccagcccgtacagtggtccggcgagatgcacgacgaagaactcgccctggtctattacaactaccgctattacaaccccaaagacggcaggtggatcaatcgcgatcccatcgctgaagaagggggggtggaatctttatgcgttcctcgggaacagccctcaagataagtttgatgctctggggttggtttttgttatgcctatacatacggcaacaggtgtgcctgggtatgatcgtccctcgaatattcctggatggggtacagctttagtaaacttccttcgttggttaattggtactgttccaccttattctatttatccagagggatctgaagaatcggaagctattaaaaattctcccattggaagagatatcatgatttttttcaaaagaaaaaataaaggagcacggttttgtgatgaatgggaaaatgcaactaatatatctatttcgtatccgggatttaaatctgttatgtcgtttacaaaatttaaacgagattttgaaagatttttctcaagtttacctaatggaataccaacttttgttggaagttgtcgtggcgatgtttctattgaaattattaataatagaaatgaattttatataaatactatatataaagtaactaatacaacatctgctacttcatttttttatcacttaatgcctagttggtcttctggctatccaatgggaaattggacacaagtatacatttggaaagaaaaaataaaatgttgcaaaaaataaataaaaatttatttcaaccatgcctataatattttttttcttgttaatttatttattatctctctttatgtccacatatataaaagattcagatatatcttttatttttaatattatatctatcattataggttgcattcctattgttttgattacattcataatttgttttgattacggaataatttcaggcatttttataggactactactactgttgctattattattgacaaacaaaataattaaatttatttttaaaaagtttaaaacaaaaatacaataaagtacttattattaactatagtttattttaaatatccattacctgaatacagagattccgataaatagatacttcgtttttcatagtaacacgatggaagaaagtcgctaagcctacatagaacaaaggtatagcaagtatccgctgtagacctgctcaacaaccgtaacgtgcttcgcacgctgttgtgggatcctctggaaccggtggtcacccgccccctggccctcgtgcagggcaatgccctttactgctatggaacagacttcaacaaaaacgtgacggaaatcttcgacgcacagggaacgatcgcggcggcttacgattactccccctatggaacagccacccgcaccggaagactcgtccagcccgtccagtggtccggcgagatgcacggcgaagaacccgccctggcctattacaattaccgcttttacaacccaaaagacggcagatggatcaatcgcgaccccatcgctgaacagggaggatggaatctttatgcgttcctcgggaacagccctcaagataagtttgatgctttggggttagaagataagaaaaaagataaagaatttcttggatatgtttatgatcaaactttagaaggaacagacatatacatttgtgaaacaacaggattgaaaataaatgacaaaattttaaataatacagtttcagaatccatgaacgcttttaaggaagctaatagtgctaatcaagcggcaagcaatattagatatgcaaaagattttagtaaaaaagtgtctaaactttataaagtaactcctggaacaaaaattcccggagtaaaaatttcttcaattaaagatataattgattttgtttatatcaaaagagatgaaaaagttgcatatcaacaattttataaagctgctacacgatatcaaacgctaaagaaaaagacattctcaagttgttttgaattatgcgtagccatgggagagtatgcaaaagtatttttaaaaaatgatttaggaaaagtaatagttaaattttctactgactattgtatttctaaatgtaataaaaggcataaaacattagattaacaaaacatgaaaaatatcttcaatatattaatattaagcaccataataaatataacccaagcacaagacaatatagaaattttgaaacagatcgttcaatccgcagatttatttcaagattttcctataataaagttcatagatactaataaaaatttaaatgataccacaagatacacacagatatcatattatcgggatagatttgaagcttggaaaaatattcaaatagtgacatctggagttatcaaattcaaaaaagacaatgtagtaggtagatcatatgatgttattcagatagatcagcaaactggaaagcctgttccaagtttttgtatgtttggtggtcgagatgcagcaatttatacatatcaagttttgaaaatcggacaaaccatgtatttgtgccaccaatggtataatgaattatggaaacctgttcataatgaatggggaatatctagtgtaataatcaaacacgattctttccaagacagagctattatgttctttttggataaggaaaaaaaatcatatgtcttaccatgcggagttgcctcagccttgtatgagaaaaaaaatcaaaagattgtattaacattttttgatcgtaaaaatcagcttaccgagctgaataatgaagaataccgtatttccaaaatagaagcttcatgcgataatgacaatataacatgttatctgaatgataaaaaaattgatatgcaatggtccaaaataggaaattggagagaaatgatgatttataatttatggacttatggcaacggaattgattggaagaattgacactcctgtatcagagctataatgcccccttagaatgcccgactgcccgcacgcagtggcggggtatggagcctgcccgcagcgacagcttcagctacaacggcagaaacgaactcaccgccgccaccctgggcgccgccccctacggctacagctacgacaacatcggcaaccgcaagacggcacgggaaccggccgaggaactcgcctacgcggccaacgggctcaaccagtacaccggcattgaagaaagcggggaagcgccttttgtgccgacgtacgacgcctcgggcaaccagaccctcatcaagacgtcaacgggcatttggacggccgtgtacaacgcggccaaccgcgcggtgagcttcaccagccgggacggagcgacagtcgtggaatgcggctacgactatcagggacgaaggtacatgaagaaagtgacccaaaacggcacggtcgccagccacgaacggtacctgtaccgaggctatttacaaatagcggcattggatatgctggacaaccggaacgtgcttcggacactgctgtgggaccctctggaaccggtggccacccgccccctggccctcgtgcagggcgcttccctgtactgctacggcgtggacttcaacaagaatgtcacagaggtcttcgacgcacagggaacgatcgcggcagcttacgattactccccctatggggccgtaaccagtacgggcagcctcgtccagcccgtccagtggtccggcgagatgcacgacgaagaactcgccctggtctattacaactaccgctattacaaccccaaagacggcaggtggatcaaccgcgatcccatcgctgaagaagggggatggaatttatatagttttaataaaaatataatatatacaacagattatttgggattattatcattggggcgatttataactaaaagattgataggaaaaataaaaaaatctcttataactgatcttaatggaccctatattccaggatattgggaagaagatgcagagaattctggaataatagcaatttgtttgaagtgtaaaggaacgaataaaccttttaaaattaatttaggtaacaaccctaatcgtattggcaatacaactactttatgtaatggatgggaaaaaattgcaacatttgatggttatgatttatcttgcaagtggaaggaagtcggaggaaggaattccgatgaagcaccccgatatacagggagagttcaaagtaaaacctatgagtgtgtaaaattgtcaggaacaggtagtctgtgtggtactaatttcccagaagattggagagcatagcaatgaaaatcaaaagaaagaaattctatattgtcgcaggaatcgcagtcttatgtgctgctttaatatattggttattgaccatatttttacgagtatacgtaatgaagtcgccagttatggaaccattagttccaacgggatcaatcgttatcatgaaacgcattcacaatatagatgaattaaaacggggagatatagttcattgaatttttccttcttacacatccattcctagcaatacaagtacattaggaatagtagttggttttcccaatgaacatctagagttaaaacatggtgatatatggattaatgatcaaatagctcatattagacctttccaatatgtttatacgaaatcagaaccaaatgtgttggaaggatataaaatgaagcagaaatatatgaatatgattattccgaaaaatacattctacatcctctgtttagacagaaatgccatggacagcagggtagtaggccctattccatggactaatataaagagtaaagtaattgagcatataaatccttaaataattataaatcatctattctatttttcattttaggaattatcattttattcattatatcgtcattattattttaattaataaacaaatttgtggaatcctctgaaaccagtggcaacaaggtcattggttttggttcaagataatgctatctacttttacagccatgacttcatcaagaatgtgacggaagtcttcgacgcacagggaacgatcgcggcggcttacgattactccccctatggaacagtcggcagcacaggtagtcttgtccagccggtgcagtggtccagcgagatgaacgactacgaattggccttggtctattacaattaccgttattaccatcccgccgatggaaggtggatcaatcgcgatcccattgctgaacagggaggatggaatttatatgcgttcgtagggaacagccctatatggcataacgactatcgtgggatttctaatgctaaagaaaaatgttgttgtggaaagaaaagattacctaataaatcttgttgcgaaaatggtgaaattgtgaattctaaatcttgcaaaataagaattctcatgggacattataataaggaaaatttagaaaaaaagattaatcaattttgtaaagttgataggcttgggatcgtaagttgttattctacagaaacaaatacatggattcctactactcaatcttatcctaatgatggtagaaatcctgatataattaacagaggaggagaagctgcacggtatttgcgggcagagttggaggcagctaaacaggaagccaaaaatatgtgtagcaaagaaaataaaagatgttgctctaaggttatcattatcgtttcggattcaggagataaggatggtaaaggagcttggcaagtaaaatttacttttggaataaatccctatacagttataatagactgcgataagcccaaacccagaaattgcaaaaccagaggaggaatggtttcctctaaataagtcgagatgttttaagtttattctactatgaaattaacatatattatatttttattttttattttttgtgttatcgcaattggtgaaatggaagataaggaatataaagactttgacctatatacagaatcatcattttttaaaaatgggaagaaatttcgagccacgaagttatctttaaatcaaaggaaggaattgagagatattttaagtaaatatgatttattcttggaaggaagaacagaaaacaccttcccttttataggaactttggctatatttcgtgttgctatagatgaaaagccatatttattatgcatgataaataatacaaaccatattttcgcagaaaaaaagattgagagagaggaatatcaaaaaaaattattttggatacaggaaatagatggaaataataatccggaaaaaccggaaattaggatatttgaatccgccgccctctatttagagttagagaaatttttggaaagaattgcatctcctgtcttgaaaaaagagtaataattgttataacattgttccctgcctccccctctgaatatagatttaaagttacgcgacgtttggggcgttgttaccacaactgtcctcagtaacggggaacagaacctacatgccgtgcgtcctacgactgcacctacacggcaacatcaacaaccgcaagaggacgcaggaaataatcgaagagctcacctacgcgactaacagcttgaaccagtcaccagcattatcaattcaactctcaattttccactcctccacaaccttttattcccgcttatgacgccttgggcaaccaggccttgatcaaaaaacttcaacggacatttggacggccgtgtacaacgcggccaaccgcgcggtgagcttcaccagccggaatggaaacacgattattgagtgcggctacgactaccaaggccgccgctacatgaagaaagtgacccaaaacggcacggtcgccagccacgaacggtacctgtaccgaggctatttgcaaatagccgccctggatatgctggacaaccggaacgtgctccgcacgctgctgtgggaccctctggaaccggtggccacccgccccctggccctcgtgcagggcgcttccctgtactgctatggcgtggacttcaacaagaatgtcacagaggtcttcgacgcacagggaacgatcgcggcggcttacgactactccccctatggggccgtgaccggtacgggcagcctcggccagcccgtccagtggtccggcgagatgcacgatggggaattggaactggactattataattaccgctattataatcctgcagacggcaggtggatcaaccgcgatcctatcgctgaacagggcgggtggaatctttatgtgttcctcggtagcagccctaaagataagtttgatactttggggttgataggaatatttggattattaggaggagctttaatagattatgggtttcaagttactgcaaactatattcaagacaaagaagatccttggacagatatagattggggttcggttaaaacttctacagctttaggggctgcaggaatacctggaaatgtaaaaataggaaaaaatatatataaaaatattaaggaggctgttaagatgcgcaaacgtattaaaaatacgtcagaaaattcacatatataaagaaaaattaccaacagctcatcaaaaaaaacttttgaaaagaaaacagaaaagagaaaatatttattctgaatataaaaatgaaataaagaataattttttaattggaattattcgaggattatctaaaaatataggttctgaggtttatgaaaattacaaaaatacgttaggaaacaagtacgaaaaatgctgtcaagacatcatcataataattatagtagaaatagaagtagaaataaaaatagattcttttcaacaatataagaacaataacattcttgaggaaaatccaaattatataccacctacaagaccattttatcctttaagataaatataaaataatgaattacttatatatattttcttttgtattagctattggcttatctttttatgtgtatggattaaaaaaaggagcatggtatttttttataacattttttattatcttattagggatcatagctgacgatttattattcccttatacaactataattgcaatattaatattatcaatttcattctatttttatagaaaattctttcatttaagaaaagaaataaaaaataataaaatcaataaaaaaatattaatcctaaaaaagtgaaaagaaaaaaacggtttcgaaataaacaaaaaaactactaaacataaataacgacaatagaatttcgtatatttaatatatcggactgtattccgaatattgttgtaggatcttctggaaccgatggccacccgccccctggccctcgtgcaggacgcttccctttactgctacggcgtggacttcaacaagaatgtgacggaggtcttcgacgcacagggaacgatcgcggcagcttacgattactccccctatggacaggcggcttccacgggcagcctcgtacaacccgtccacctgtgggatatcaaaagcagcaatgtcgcagaactcatgcacacaacgactggaatcctcattatcatatttttacagttaatcagtctcctagagtagctggttgccggtgtttcgataaacatactacaatttcgaacaatccctattatcctgaatatacaggtgacctaccaaggaggaattgaaaccatcaagtaacaaaaattatggcaaattatttttcaggagaagaaatcaaagttggagatctcattactacagataacggacatgacaaaaataaagtaatgaaattaatagataacacatatttaatgcaatcttatggtttagattgttttggcgcattattatctagcagcagcgctaaaggaatgatctttgtatcgtttaaagaactttcatctccagatacaaaatttataaggaggaaaacaatttaaataaaattatgaaaacatgaataatcattttaacagatctttcttttctatcaggaagcaatttgtcatttgcagaaaaggagcaaaagaacacacggcaagaattttcttttggagatgatcattgtgtgactagatttaatttttttgaaaactattcaactgattaatacggaaaaatatacacattcagtattcaatttctcaagactggatatggttaaatggaatatttgatagcagaaagtataataaccgaaaatataaattatccttctttcccgcatgagtatgaactcatcataaataattgggaaaatgtaaaaaatagtgtgaggaaataaaaaataatgattattataaatcttctgcttttaaaaattgtcatgaatgacatgattgcaatatgcaatggattttttaagatatgggaaaaatagttttagtcaaaaaatataatatattctacggatttttattttctaattgatgcaatagcaagtctttcttattctgtattaagagctatgatgccctgggacacgcgaccatacgcacgcagtggcggggaacggaatccgtccacagcgacagtttcagttacaaggcagaaacaaactcaccggagttaccctgaacaccacccctacagtacagctacgataacatcggcaaccgcaagacaaacgcaggagacagagaaaaaatttataaatgcctattcaattttatacatcttcacgaaattgttatggattaagatttattgtaacaatatatcgccatccggtatacgacgaaactttcgaaatctaaaaaatcatattatgtcaaaatatataataattcctattattttcacatcaacaatagtttatggagataatcaaaaatttaatgaatatgcaaatttttgcgaaaaaatgattgtcacattgcagagttgcacggatgaaaaatccactttttcacactcttccgaatttcctattattttatatactgttttaaatgaaaatcctttgaaagatttttttaaatctcaaaagggagctttatatcatattatgctattggcagagatagaaagattgaaccatcacaaatggttcaatctttcctcaatgaaaaatcatgtcgatcaaatagaagcaaaaaataccttatgcaacggcatagaggatccaagttttgctgtttccgccaaggaaaaaattgttaattacgtaaataatttaaatgataataaatcagatgtactctatttaatttcatatttattggatatatacaaaattaatgatttggaattgtttatgaaaatcatgtcgatatcagattgcgaattgctcaaaaaaatagatataatagaaaaaaagattggttctttacaaattgatcatctggaacggacaacaatcaaacatttgataaaagaaattcaaaacaaatataaaatacatgaaaatatttataatgaattaagaaaaaaattaaacagtaacatagattgattcgtatcaagaagaatttgtatatgataaaattgcttctccgagagaaatcatgcttgtctccagcagcctgatctatgatggcctggatgccgtcccctcctacggttacagctgcgacaacatcggtaaccgcaagacggcacaggaattggcctaagaactctcctatgcagccaaccgcgcggcgagcttcaccagctgggacggagcgaccatcttggaatgcggctacgaccgccagggacgaaggtacatgaagaaaatcaccgtcaacgggacagtcgccagccatggacgaacctgtaccaggactatttacagatatctgcctcttgactgccggacgccgaacaaataaaataaataaagagaaccctatatttgttttcccggtttatcataacaaatatcatgcttgattttctcgtttttctgctggatatcccgtcccttcttgctgatttttctcctcgcgccaagcataagggagaatcaccgtactggcgtttcatggggctttttttactgactgcagaactggttattctatttttatgggatattacggaaagcccgccagctcttgtagcctgtattactttgggcctctggctgatcgcgcacctctccatccgcgccttcaggaacgggaaaaacgtaaacggcctctccgtccgttccgctccgccattttcctcacaggcgccacaaagaaatgaagcccctaccccgtatctccccgaaagggaatagctatataatttatttattatcaatcattttaaaatatatacccggatttttgtcatacaaatttcttctttttgaacggatgctcctgtccgggactctaacctgcatcagcaacaaaccgggcggcgggaggtagagagaccgccgcccattatggggagttctgagtttcataggtaatatagttggataaaaaacccgcacgggggaaaccctgtgcgggtttattcatcccccctcccggaatgccggaaaacagggccggaacaggccgcagaaaatcatggctgaaccaaattaaggcttgagagttgaaggcatctcgctaatctggcttcagcaagaatcatctgttatcatggtcaccacgaacgaaccgaatatttacgaaacgggagtactggactccaatgcggaaggcaattttgtctataccaccctggacgccgccatcaactggattcgtaaaaattccctctggcccatgccgatgggtctttcctgctgcgccattgagttcatggccgtggcctgttcccggtatgacctttcccgcttcggctcggaagtgacacgtttttccccccgccaggcggacgtgatgattgtagccggcaccgtcacttataaaatggccctggccgtccgccgcatctgggaccagatgccggaacccaagtggtgcatcgccatgggcgcgtgcgcttccaccggcggcatgttccgctcctattccgtactccaaggcgtggacaagattcttcccgtggacgtttacatttccggttgcccgccccgtccggaggctattctggaagccctgctcaccctgcgcaagaagctggatacccagcagcccgcacgcactttcttcaagaaggaagaacctcgcgaagccaacgctcccgtcccggtcaatacggaaatgccccttgaataagttttttcaaacgtttcttccgttcacttttaccattttttctccatgctttctctagaatcacagattaaaaccgccgcagacaacgcccaaaaccgctttgggaaagacatcatcacggaccgctacgaatcccgcggagatattacgctgaccgtcgcgcgccaagccgtggcggatgttgtccgctggctacgggattccgccgggtttgatatgctggttaacctttcttccgtggacaatatgggggaaagcccccgctttgaagtcaactacacgctgacacagtcggaaacgggagcgaacctgagcctcaagacgaaggtggacgatggcgaagaagtgcccagcgtcacggaaattttccagtccgccaactggcacgaacgtgaagcatgggacctgatgggcatcaagttctcaggtcatcctgatttgcgccgcattttgatgtgggaaggttatccttatttccctctgcgaaaggatttccctgttcaaggcgtacctactgaactgccgggcgtcgcctttacggaggcggctcccacccagggagcgccgttcgctacggaacaaggccgctgccccagtgcctgccgcgaaccccgatcccataaattctagcccattttccagccccgcaaggcgggatcccacccatgacccgactcatcctgcccatatgcatcatcagcctgctcagcggctgccaggacgccaacccggcagagcgggaatggaaggagcagttatataaaaacctggcaatcgtgggggccaggaactggattgtcatcgcggaatcctcctttcccgcctacacgggaaccggcatcagaaccatggtttccgacaagacgtcggacgaagtactcctggatgtgctgaatatgctggaagaggaagcccacgtggtaccccgcatcatgatcagctcggagctgcgcagcattacggaggactatgctcccggcattaagcgctatcgcaacaatatcaataaaatgcttcctgggcgccagcattttgaactgatgagccgtacgatcaattccctgatcgaagacgcggccaggcaattcaacgtgctggtcattaaaaccaagacatccctgccttactccaatatttatattgaactggattccgggtactggaattcggaatcggaaacggtactccgcaagtctctggaagccagggacgccgccaaccgccgcgcggcccaggacagagtgctggacgtgccgctggttccgggagccacgcctgcgccacagggcagcaaggaaaatccgccaattccgggagctcccgcctcccccgcggacaacctgccggagctcccgcgggaaaaccgccaaccggcttccccctccggagacaaggctcccggcgtgcctccgcctcccatcagggatcctctgggagggaaaaccgccattgccagattttcatgaaccatcatatggacaaggctacagaagaacgcctccgcgcagaggcatgggtaggggacgccattttggcgttgtacgtcagggaatggattctggcggaggaaggagcgatcaacggcaagcttttcgtagaattcaccagcaatgattttctgcgccgcaccggcaacgccacaggcgtggaagcggagataggccgcactttcaaagcgggcggcctggaagcagcctatgcatggattgagcatcatttgaagccccgcatggaggaacgctggcacaccctgcgcagaaaagccctccggtaaactgccgccgccatgcccgccaccggaacacccctgccttgggaccgcggcaacggcccctgcgtgatggccccgccccatttgaggggctgggcggaagaggccgccgcctttctttccctccggggcatggacggaatcacagccttcgccacctccggctcttccggttctccgcccaaagccattttgtttacccgccgcgccctggacatatgcgcgcgcggggcattggaacatttacatgcggaaagcggggactggtgctgcccgctgcctgtatggcatgtggggggcgccatgatttacctgcgcgcggccctggccggaaccgccgtccatacgctccgcggaaagtggtgcccgcaggcttatgccgacctgatgaaaagttccggagccagatggtcctccctggtccccacgcaggtagtggatctggtcagcctcggcctccgcgcgccttccaccgccgggtgcattatcgtaggcggcggcgcgctggacacggagacgggacggaaagcacgcacccttggctggcccgtagtgcagagctacggcatgacggaagccggctcccaattagccacggcccttcccggagattccttccatacggaccgcctttcccttctgccccattgggaagctcagacggacaaaggcggcctcctgcgcttccaggggaaaggcaaattgttcggccgcctgctgacgcagtctcatggagggttccttctggaaagagtcgctccgcaggagtggtggagcacccgcgacctggtgcgcctggaagggcgtttgctgacctttctgcgccgggcggacagacttgtcaaagtcctgggggaactggtggatccggatgccgttcaggacgttttacgccgcagcgtcccggaggctgtcgtggaggcagttccacatccgcgcgccggaatggaactggtcgcctgcggcccttccgctgcccccctgaagcaggcctgccgcgagtggaatgcgtcggccccaggcccccagcgcatccgcgccgtcatggaaacgcccatccccctcacggtcatgggaaagctggacagaaaccggctgcgctcccagttgagcgatcatccggaaaagttgaagggaatttactaaaaggtaatcttccggggatattcatcaaaagaatccggacctgatggaatgaagaaatacggcggggttggaatccccaatcccttgcccacttcattcatcccgtctcccaggaagccattttcctctgccttgcgggcttccgcacgcgtcttcggaaccacccggtcccactccatttttttctttggctatgtcacaacaaacagttgataaatagccatttttataggggagtatcagaactcccctacaaactgttatttgcagttatctatactcatttggaatttcgatatgaagtgtctcacacaataacttcacatcatgtgcatcattttcatcaaactcgtatcccagatggaacattacttgactatatggttcaatacaggaaacctctatttcctcaattcttcctttacccgaaaaagtttctaccggaaaacaatccccatcataaagaatttcaccttcgtccgtatattcaaaacaatgcaaatcaataattctgtttttcaaatcttcccatacagtatggttcaatgttgtatattccatcttaatctcataaaagccattagctttcattatttctataaagttctgataatcgttcttttctacaaaaatgtcaatatcattatgggctcttgactgatatccaagaagagcatctacaccccagccaccatcaagaaagactttaatctccgcatctattgcaaattgaagaatctgttttacatctgttatattgaccatcttatcatctccacaaattctaattaggcgaccagaggaactgctggtctgtttgataaatctctgcatttagcagttttcaatgttgccaaaacgaaagttaagaagatgttccttttctccatgtcgctttctttggcgtaatttacaaggttattccacacaagatagttgttcagatacttggtagaaacaccgttaaagccacgcataaacctctttagctggctatggtagctattgatatgttggatattataaatgcctttcttggctttgccagtctttaactgcacaaggtcaatgccattggcatttgtaaatctcacataggagttcatcttgtccgtaacaagagtggaattggtcttaatcctaccatcataaatatgatgtaaatctcttgtagaaactctaccagtattcgtaatcttggagatagacaagccattcctattaaccgcacaaggaacacataccttttcttgggacaagcctctgatatgtgtagaatgaccacgcttatgagccttgcgtggcatagcaaatgtcttactcttgctatgattgcccttgtacgagatggcgaaaaaagtttcgtcagcctcaataatgccgtcaagggtaacatcgtctgccatattctgaagtgcatccaaaatcttgtgtctccaaaggaatgcggtgtttctgtgaatcccacaagcaacagcagtcttacgaatggataagccattcatcatacaatcaatgtactgctcccacacggacaagtcttttcttgtaccagacacaatggagttcgtagcaatcacgaaggacttgccacaatccttacatacatatcgctatgtgccatctttacgatgaccattgcgaaccacatggatacagccacaaagagggcatacacgaccatttgcaaagcgttcctttgctacgaaatcttcaatattcaaagactttacaaaggcaggacttaaaagcattgttttaaggctttcctgctctgcgacagtcaacttaccgataatatctaatgcgtctttgatagtaggcatatccaattacctccttcggtggtactgtttcttactattattatacgctatttctcgtcaaaatcaaccatttgttgtgacagagccttttctttaaaaaaagaacgtgacatgaccaataattaaacattcagacacgtgaaaaacgcttgtagggcagaggtttttcctgctagaaaagagttgacccatgcgagcccgtcttttgcttattccctttattttttccgttccggcttatggccaggacatttcgtccgccgcagcggcaaatcctcccgggcaggtgaaatacgctccggtccgggacctctcccaactgcctatggacggcggctggacgtacggggaagtgctggacaaagccgcggctggagacttccgggccaatatgctggccggggaatactggatggggctttattacctgaaccgtggagacctgccgctggcctgcctggaacatatgcagcattttttccgtgatgcggccacggcatccggccatccggcacccaagctcatgatgacggatccttacgggattttcgggattttcaaggcgcaacccatgcaaccggaacatgcggaatggctggctgcctgccgcaagcttgcggaaaagggagacatggatgccgttacggccctgtacaccgtcacggatcttccggaagccgagttgagacgctacctggcccccctggaaaagaaggcctcttccggcgaccaggatgcgctggcccagctcgctttcatcaaagtggattggctgaaggaaaatcccgccaacgttatcgagaccctgaagcaataccggaaaaacgccaaaccggttcttctggcgcggataggggaactggcccttgccctggacggcaaggacggcaggggatggagggatacggccattcaatccctttcccgggctgcggaaaaggggcacgcgggggccatgcggcttctggcggaattgacgaagggggccgcaccggcacaggccggaaagcttttggcggaactgcgctccagaggggatctggaaactctgctggcggacctctccgccggcatgaaggaaaaaacagggggagggaaaagctccctcctccagcctttgttcgagcaggccaggaaactgggcagcaataacgcctgtgcctggtacgcccagttaatttccgaagcgcaacccccgcaggaacaggagctgcgcaaggcgtcccttgatctgctgtcccttcatgacgaacggggcatgccatacctgaaggaacctctttccttcccccagaaaaaactcaaccagcttcccccctacgccaagacacataaagagcttgagctggcctctcagcttggggacgcagattccagcgtacagttgggcgagctgtggaaggaggaactggccaatacactggattccgtagggaaggcccatgaagcgcgggaaaatatgcgcgtatggtacaggcaggcggcggaggaaggccaccccctggccaggctgcgcctggcccaaatggaaaacccggacttaatggacaaaccgtccgcagaacctgccagaacgctgctgaacgattgcctggcaaaagccgccgcaggagatttcatcacgctgaaaggaatttctgaatacgtcacgccggaacaatgggaacagctgaccgccaccctccgtaaaaaagctcagggggggaacgcccgcagccaggcggatctggcatacctgatgttattcagttacaggagcgaagaatccggctacccggaagccctggcctgggcccggctttccgccggacagggagatccctgcggcatgtacgtgctcggccgcgccctcatttatgaattcggcctggaaaaacgcatggccgagggggattcctggatgttccggggagccttgaaaggccatgtggatgcggcggacatgtggagttccaacaatgagaacctgcagccttacagcgccatgatgcacggtctggcggcacgggggcatatcccctccctgcttttcctggccaaccaggcggcttatccccagaatacgggggaaacagcggccctggacaacggattcacttccgcctgccagcaggtcaagctgaccctgaacggaggggacgccaacactccgccgtggctccggaaaccggaacagaagggtaagggggaagatattccggcggatgccggaaccgttcctccctggatgaccccgtccggcagggaacgccaggccccggccccgaaaaccatcaatccggaagccgtgaagttctgggaacaagctgtggaactcggcagcctgacggcactggacgagctggccaattattatgaaaccgtggcagggaatgtgcaggagcctgcggaacggcagcagcttctggcctctgccatgacggcagccaccgccctggtgaaaaaggaggacgtacgcggtttcaagaggctggcccgctattacgagcagggcatcggcgtgcagccgaacagggaactgtacaaggattatgtactgaaagccgcggaaaccagggatccggaagctctggtggagaaggcgcgcctgctcatcaagggagaggatctggagccggacccgaaaatggcgctggatattctgaccgatctggaagagaaccagacgcatgcggtgcccggcatgcatttcctgctcggctacttgcatgaagaaggcctcggcaccccgcaggatatggccttggcctatcagttttacatcaagggggcggaacaggacgacgccaagtgcatgaacaacctgggttccatgtatgaacgcggaactggcgtagccaagaacctggccgaagcccaaaagtggtatgaacgggcggcggagctggggaatgaagacgctcttgccaatgtggaacgggtaagggaaaaactcaacacgaagaagaaataggctcctttcccgttccggaaatgccacggaatggcggtggaacacaaatttttggcacaggtttctgcagacggcagaaaataatgcgtgcgaagcggacgcgattttttaaagcgcccctgcctgtttcaagggaagcaatgcttttgcaattcgagcatcttatacaaacagccgcccgtccggttgcggtacgggcacgcggcgctccccagccgggcatgccccgccggaccgtctagatttctcaaaaaacgggaacaggaacggaatttttttcagaaaggacgtaccgaagttattcccgagtcactttcaaccgcagaaaccggcgttccatcccgctttcccgtacgggttccgcatcccaaaattcggcagccgtctttccggcggtttccacttctcccagggaaatccaggcgaccaggtccgtggaggcttccacttcatgcttcacatccgttgcctgcggatttacaggccagcgcagcaccagatgcatgcatccgtcctccccctcttccagcgttactttcgtaacgctcccgcagggtttcaacggatcctgtcctgtggcgtatttcatcaggttggggataccgtccccggcaggaacggcatccgcagccgtccggtccgcggcagcatccggagggaaggagtcctgcacccacttgtcgtagcccgtcaattcggcgccatcctgcgttatgatgacagagcattcctgtttgtcggaagaacggaagattaccattccggaccgtccgtcagcggatttgttttccgccgccgtcaaaatgactgtagtccggccgattcccgaaacggcggaggcggaaatccattccggacaatctgcgaccacccagcccagagccttctcttccgactgcacttccaccgccacggcaccgcccccggccgggacggtttcccccgcagaagaaagggcaaagggggccggagtatccggataagcggtggaggaaacataacggttggcggcccgaagcaggcagcattcgtcaaagtagttattcttcccggcggaatccgccacatccattcccaaatcccagtacatgaacccagccacttgctgttcactgatgtagcgggcctttttcctgaccgtatccacaccgttgaagtgcagcgtcttaaccttgcctccgccataattgaagctggcggaatccagagaaggatcctcccgcactccggcgcaggctgagacaatgtcccggtaagcccggatatcggcgccctgccccgcgcccggagtcccctggaacggagcgctgagcatgatcttggagtccggataaccccatgaacggtacgttccgcatgcggaaatcatgctgctatatccgtttacatcaatctgggggccataattctggaacgtgaaataatccacataacgcatgcaggccgccgggaatttataatagtaggtatgcagggaaatggtaaaaaacatatccggggaagccgcccggatagccctggccaattctccgtaattattccaggcggccgtattgttctggtcaatccattcgaagtccagatccagtccgtccaattgatgcttgcgtaccacttccgccacattttcggcaaaagccttacgggcatttgcatcagacagcatggcggaccagttcccgccggagacacccagccgtatccgcattccggaaacgccttcagtcagcctgcggaggatacggacatgttccacccaggaagctgtatcatggccaaattggccacttgtcccccagcggcccaccaacagcctgtctccccagctgtgctggacagccgcccccaggcgggccgccgcacgggcctcatgccacacgcgcatttcatcaattctgccatccaaattccttcctatgacggcattggcagttccttccatttcccccgcatccgcggcggccgtgcttacggcctccccgtccacataaaaggacgccgtatccgcagaagaattcctgacgaaggccagccagaaatacctgccggcttccacaggcggcaaatccgcctcccaggctttatccgtgcctgcctgggttcggaccctgtaatggtcttccttccattccagcctcacggaaacgttatcattttcaaacagcaccgcctcctgcccgtctccgtccaaagccatgcggacttccacggtaaacgctccggaactgccgccgcccagcaaacctccgcccacgttcatgtaagccccttccccggagaagtccaggacattggaacattccccgtcagacggcagcagaaccacaccggagctttccgtcacgtcattgtccggatattgaaaattgagagaaccgtccgcggccggcgtaacggaattgatgtagatcaaatcggaattattgatgagatgggcgcgcgccggccagtcataaataacatgcacattcctcacatacgccgtcaccagcatgtaacggaacgtttcattgtccgtgacgatggaaaattcagtcccttcaggggcaaccgcctggtaagggcgcacaaaggcgctccctgtcttttccgcaaattccgtccacttggcatcacggaaatccccatccagacgccagcagcccaccagcctcccatacctgggatgggacaggggcaacggtccgttcaagaaaaagtcgtcttccttcccgcccagagccgcattccagaaacgcagttcatccagagcgcccttgaaccccgcctccagcacaatccctttccagcctgatttcatggcctgcaggtaaggcgaccgcggcgaggaaacggccaggcctccgtccacatacagactgataacctcctccccgacggagacggctacatggtaccattcccccgcagccaattccttcccggcagctttcacggaagcgacggaatccccatccggagcagacagagccagacaaccgtgttccagggaaacagacgcatttcccaaagaaatgatttttcccgtgacggcatcatcattgggcctgacccagaattcacaggttaactggccttcagccgcccaggtggaagaaggaacggggagcgcaagagaagaaggaagaaaaatgagcgccttattgtgcaagacgctgacaggccggggatccggaacttccggagccggggaatcgtccgtactgacggtaacggcattcagttccatgcggccggaagcgctgctgtccgcctccttggtcacatcaaacaccagcctgccctgttcatccgcacaggccctccactccacagccagataagcgtcctgttccgatgaattggaaagaccggaaaattgattcccggaaaggctccccatggaactttgaagcccccgcacatccaccagagttccgctgaccagcgtcatggattcataatcaggcgcattgtgcccgcaaaagaaagataccgtatattccttgcctgcctggaatccggaaaaggaaagcctggccgcggcggaggcggacggcatcccgttggcgctcagacgcatgctggtattgaaagcttcgcagccattggggaattcaaaagaagaaggcgcgtcagcgttcgtaccgttgtgcctgtgcttccccccttcataccaggtataccgggtattgggttccgccagcgtataagaacctccagaactgcatctggcggagacggtcagggaaaccagccttccgaacaggcttcccactgccacggacgaagaagaagaagccgcaccattcctgattaacggaacggcaacaaatgtattggcgcctcccgatgccgttgctggcatggttacattggtccatccctcctgcgccgttccggaaccattacccaggtctatgccgaagccggacgtctccgccgcctgcaggacacagacgcctcccgcaaaaaacgctgtcagcaaatgggctgcccttttgaaaaataccttaaccataaataccgtccgccattttatccgtccctgtccatcaaaccagaaaaaactgcgtgggaaacggataaaaaagaggggatgaaccatcccctcttcgcacaaaaccggcttggacacagcctgtccggtcaatcacctgtatgaccgtcatcagtttctgcggcggcgcagaagaagggcgcccaggccaaaaagtcccagagaggccgtagccggttccggaacaacttctcccaaaaggcgtatattggtaatatcagcggccattccagcgccagctcccaatgttgacgtttccatagagttgaatatcaatccataagacgcatattcatccgttccgctcaaatccaagctaatggaaaaggaagagggagtgttcgtcaggttcgtcttggcgttttccaatgtccacgttcctatgaccgtagattctccatcatccgagaaaccataaacattgcaaatatatttgcattcaaaattcccaagggaaccaccccaagaagaagttttggcaatatcaaactgcagggaggcggaagccgccccagacggcatgtcaaatttgagtccggcaaaatttcctccggcattattggaggccacggctccgatttgcaacctgaggactccttcgtcaaaccctacctgaccacttaaactactgctttcccaagtcccgtgccattccccgacattataaccgaagacgttttgaggagtgatcccggaagaagaaacacctgtagtcccagaacccgtcggggacaggtcaatggaaaacgaagaagcatgaaccataggaaccaacgccaaaaccgccaagagacacaatgtttttctcataacaatccgttccatatcggatttagaattcggtgtcaacataaaagaatcaaaaaatgtagataaatgaatctgttaccatgttttttcctccagtcccgaacgggaaagaaaacgaattgtcccctccgtccattatggaaacacaaaaaggaggaaaaacaaagcctctctcaatgaaaataatttttagattaattattaacgcattacatacatgatgaactgaaatgccaatgaccggattattttttgtaccgaaaatgtttcatcctttgcattcgcaatgcggattctaaatccgcctaaaaaaaggatagaattttatatacaaaaaggcgcaggcattttggacgcctgcgccttttcctctccctcaaggaggaaaaccgcatcaataattcaggatgccttccgcgaccttgcgttcgaagtcagcaacatccaccacctgcccgctcagccgggcgtgttccgtggcaaaggccatcacatgggaatgggcggattcctcaatggaagtggtcatatcctccggagagggcaccgtcagcatgtcatcatacagagcctcaatcaatccccagtcgccgccgccgtgcccctggtagcctccggccagttcctccaactccaccacgcgggtttttccgccaaagtggggcgtcacggttatttcaccggggccgttttccttgtagaagactccggctcggattttgcctttggtgccatacacttcaatgtggcgcccctgttcgaaagccgtcatcgtgaacgtgcccgtcaagcctccctcaaagcgcatgatagaaacctgatggtccggctggtcgttgtcgcactggaggtagtccctgccccacggggaggttttcagccattcgcaaatttcctccgcggtagcttcctgcgcccggtcatataccatgcccagccagcgtttgcattcgtcgtccgtggcgtatttgcgggcgtcccaggggtcttcccccaccggggtggtccagtccgtgcagcgttccggccggggtgaggagagcgtctttttcgtaaagaaggtaagctccccgaagctggcgacggaaaggcatttacgccggcccatgagccagtagaggatatccatgtcatggcagcatttggcaacgatcatgggcgtggaggttttgctgttgccccagtgtccgcgcacgaaggagtgggcaaagtgccacgcccccacgccttcattggcattgaaggtgatgacttccccgatttccccgctgtcgatgatttttttcagggtccggtaaaactgggtgtagcgcagcacgtggcacacggccacgcggcgcttcagcaggcgcgccgtatccctcagctccagcgcttctttcagcgtcttggcgatgggcttttccagcaggacatgatagcccagctccatggccttcctgcacggagcgtaatggtagtcgtcctgcgtgccgatgatggccacgtccgccaggcgcggttccgccagcagggaagcggcatccttgaacaggcggacggaatcccgttcctcctccggggcaaagtcacgaacggcttccgtgcgctgtttgacgggatccgccgcggcggcaatgcggtagcggtttttttgttccatggccagcttcatgtaggtgcgcgtacgggaaccgcacccgatgccggcgagggagagtctcttttgttcaggcataaggattgtgcagataatatgggtagagaggttaaagaacgccggatttgacaagcagcgcttccgcgtccggatcacggcccatgaagtcgcggtagagttcagcggcaggcttgctgttgcccttgctgaggatgcagcggcggaagtcgcgcccggttcggggattcagcactccttctttcaggaagcggctgaaagcgtccgcttccagcacctccgcccatttgtaggagtaataaccggaagcataacccgtgggatccgcgaagatgtgggtcaggcggcgcgccacggaagggccgcggtccgtcatcggcacccggtaatccgccagaatgcgttcatccgtttcttccagcggaacacccttgtactgaggccagtttacgtgaagctccagatccagcttgccaaagcagagctggcgcatgaaatccgtgccgctcatataattgcgggcggcgcgcattttggagaacagttcgtccggtattttttcacccgtttcatagtgggcggcgaagaggtccacggattcacgctcccaacaccagttttcattaatctgggagggcagttccacaaagtcccaggcaacgttggtgcccgacagggacttcacttccacatcggaaaggagctggtgcagcaggtggccgaattcatggaagatggtttccacctcccggtgggacagcagcgcgggcttgtcccctacgggcttggtcatgttgccgaccatgagacccagatggggaacgcggggttttccgccgtgcggaggttcccctacgctcaagtagttcatccacgctccggcgcgcttggagtccctcggatgccagtccgcataaaaggaacccaggtgttccccgctttccgcatcatgcaattcatagaacaggacgtccggatgccacacctccaccgcgccttccggcgcttccccggattcaccgggcttgaacgccaccgtgggacgcggcgtgaccgtgatgccgtacaggccggagtagatggaaaagagcccttccataactttttccacggagtaatacgggcgcaggtcttcctcgtcaaaagcgtacaattcgcggcggcgtttttcagaccagtatccggtttcccacggggagagcttttccacgggttttcctgttttttcctccttgtatctgcgaacggcttccatgtccttcaggaaagagggcttcaccctgtcatgcaggtcgttgatgaatttcagggcgttggctccgctcccggccatgcggcgggaagtggcgtaatccgcaaagcagccgtaccccagcaaatgggctttcctgtccctcagttccaggatttcagcgataagggcttcattatcgtattccccgcccttcccgatggaacaggagccctcccacatgcggcggcgcaggctgtccgagtccgcaaactgcatgacaggctggagggaggtgaatttctgggtgaagcgccagcggggggcttcttccgtgccgtggccgttggccagggcatccaggcgggcggcttccttcgcggaatccggcagcccggaaagttccgcttcatcttccacaatgagttcccaggcgttggtggagtccagcacgttttccgcgaatttcttggtcttcagggagagttgggcttctatttccgcatattccggcttcacgtcgtccggcaggtccgccccgctctcacggaagtctgccagcgtttcctggatgaaacgctgcctgacgggggaaaggcttttcacccagtcacaggaggccgcggctttcagcaccgtccacaggcgcgggttcaacggcacggaggaggagaaagccaccacttccggcagcatttccccgatggcctccctctgggcgggttcgtcattgacggagtccaggtgcatgatgcggccccagcccaggtgcagatcctcggaggccttttccagagcgccgaaggtgctttcataagtcagggactccagcggctggtcgcaaatggtccggatattctctttggcgcgggagatggcttccgtgatgtccggcctgatggcctccggcgtaagccgggaccaggaaaccagaaaggaggggtccagatagggatggttcatattgcttgatgtatgatgttattgaaaatgacaacggacgcgttccggtatttgccgcaacagccatgaaaaaataaaacttaccatgtttaaggaacatccggcggaacagccgcaacctgctgagcatcttgatgaatgctacggcagatccggcctccggggcatgcggaccgaacatcttcatagcggcggagaaggaacccgcaaccttccgggcacggcttcacgccccttttttatcaccgcaggcttatttttcaagatgaacaagcttcctgtcccgggattggacgtcatgttccatcgtgatgagggggaatgccatctccaatccatccatgaggaaaccgggcatcaaaaccgctcccccacgtttattcctaattattttccggaagaacgggccttgtccagggtctccagcactccggcatggttcgggaagcgtttcagtgcctgttcgcacatatccgcgcattcccggaattttccggccttcaggtaggcgcgggccagcacccattccgcagggtatggcactacgggaggcaggagcagggaggaaaaacgctgactccgtatggcctcggacatccagacattggcggaatccgggaacatgagggagcggatttcagaagaatacaggctacccgcctggaggcagcgcgcccagtaggagacgctcatctgcctccgggcggcgtccgcgccgtccatcagcagccgcagaatgccggacatcttgtcaaaggcggacgccacggcgtccgttctgccctgccttgcggcgtagcatgcgcccatgtattgggaggccactgcggtcatgccgttgctcaaatccggaaaccctttggggagaggacccggaaaagccttgagcacaagggcctgccggggaaggccgggccgggccagcatcaggcgcgcaggcagcgtcctggcctcccacagctgaaggagggttccgggagccagcggatgctttttgtccaggggaacggaagcggctctggaggcgatggcttccgcccttttgtaacggccggcgcagaattcggaaacggcacggtaaaggatggaacggaagtaggcgtcatcaagcgcgggagacacgttttccgccttctcccaggccaggcacagattttcagactccttgaacgcggcggatgccccttcataatctcccgtgcggaacaggcaatggcccagtaaatgatgggcggatgcggaaaaggggttggcggacacggccctgcgggcggtttccaccgttgccggagaaatggatggcgccacctcttccagcagggcgcgcatgaacagggcggcctgggagccggggcgttctttcaggacgtcttccaccacgcggacggcctccttctgcccttctccggggttgccctgcccgtcaaagccgtcccggaggagcatggcgtaaaagaggggagcgtatgggtcgcgcttccaggtggaacagatggttttccacgcttcccgcgccttcacggggccatccatcagcaacacggccagggcatccgcataagcgcgttcccgttccgggcagtccgggcgcagcgccagatctttcatgcgcttcatggaatggacgcgctggtcctggaaggcgagccccgcgcccatcaggctcatgcacctgccccagtgggccatgaggcagtccgggtccagacggagagcggcgtcaaatttaaggaaagccctcatgtccccgaacgtgagcagatgcgtcattccctccagcaccagcatttgcgcggcgggagatgaggaacccaccatcatcggctccacgccgggcggcagcacggcaggctgcgccggaacgccggcgcggaagacggcttcccgccagccgttcagagacgggctgttcatccaatacccgtgtgccccgtccgcggcggcggaagaacaccccgccacggcggcggccagcaggacatggaggaaagaggcgtccatacggaagaaacggttacatcctgtccggaagctggatgcccagcaggcccagcccgtgcttcagcgtgcgtgcggtcagctcgcacagggccaggcgggagtgccgcaccggcccctccgacttcaggaccgggcacgcctcatagaaggaatggaaagccctggccaggtcaaacaggtaggcggccagcacgttcggacggcagtcgtccagcacctgcggcaccacttccccgtagcgggccagaagccgggccagatggatttccgcatcttctgaaagctgaatgggggcggaccagtccaaaggcccgccgtccagcttgcggaagatggagcggacgcgcacgtaggagttctggaggtacggcgccgtatctccctgaagagccagcatcttgtcccagttgaaaacgtaatccgtcatgcggttctgggacagctccgcaaacttcacggcgcctatgcccacaacttccgccacgcgcttcttttcctcatccggcatgtccgggctcttctcctccaccacgcgggccgcgcgttcaatggcttcatccagcacatcctggagggaaaccgtatccccggaacgcgtcttaaacggcttgcggtcgtcacccagaatggagccgaacgcaatgtgccggtagtccccgtccatgccgcggcggcgctgcgtggagaaaatctgcctgaaatgcagggcctgaggggcgcccaccacgtaccagatggaatccgcgccccacgtcctgatgcggtggtccagcgtcgcgaggtccgtggtggcgtacaggaagcctccgtccgctttcctgatgatgcaggggttggcgcgccattcccccttgtcctgcacgaggaaggggtcttcattgggcggcacggaaccgtcggaaaacacgcagatggccccgtcgctctcccgggccattccggcggcgatcatgccgtccaccagcggggccagggcatcattgtaaaagctttcccccagccagtaatcaaaatggatgtcaagctggtcgtaaattttggaaaggccggatttggaaacttccacgcagcgtttccagatggccaggttttccccgtccccggcctggagcttcaccagttccgccttgcaggtatccagcagttccggcttttccttgcacatcaggttcacatccttgtacacccgcagcagctcgtcaatagggttggcggccagggcctgctcatccagaatattcttccagccccacaggatcatgccgaactgggtaccccagtccccgatgtggttgtccgtaatcacatggtgccccacaaaacgggccacgcgggaaagggcgtcaccaataatggtggagcggatgtggcccacatgcatcggcttggcgacgttgggagcggaaaagtcaatgacaatggttttgggggcctgcactttttccacccccagccggtcatccgccagcatggccagcaggcgcgctgcgtaaaattccggcctgatgcggaaattgatgaatccgggcccggcaatttccagggagcacacggcatcctgccctatccggtccgccacctgctgggcgagcacacggggattcgtgcggcaccgcttggcaagcaccatggcggcgttgctctggtaatccccgaaccgcaaatccgcggagggcgtcaccgaggcgcgaaaatcagcgggaagctcctcccccaacaccgcctttaatgcggaggacaacttttcttcaagaattccgggtatggtcatgtctgcccagatgaacggacattccaccgccgtagtcaaggcgcaactgtcatcaagacataccttttccggtaaaaacaacaggacggagataacatccctgtcccagccggcgaaccggacgcccggcgcccgaatccccccttcccttcaacgggcgcttccttaaaaggagcgcattctggaagccttcagccacgcttccagttttttggaggctctggcctccctttcccgtttcttttccggcacggactttccggagaaagccttcgccagaaccaatgccagttttcttttcattttcattttatttatattacagtttttgttcctccgcatgcgggggtttgggaatcatcccgccccccctccggggaacactgcctacatactgtaccaggtaagtttagtccataagaaaaaaacaattccttgtcatacttgatacaataagacgtaaaacattcattaaaaacatctctccatcaactcagcatcccctgctgcgcgtcaatcaaggagccggccatcctttatccccatttcctgcctccggcgcggcggcacgcttttcatggctgatccggcgcacgcttcacaacggatctgccgccgcgcgccataaagcgggctgccggaaacgatacgctgcccggaagccccaacagccccgcacctcatgattttccgcgcaggtgccggacaggcattaccggaagagggtctcctgcttcattcccccctgaaatcatatttctccgccttccacaggaacatgcgccggtacaggtggtattccgtcacgcaaaggacgggcatgccgatgatgccgatgaacggcagcaggcgaaacaaatgacggcacagaaaaagaaccaccatcaggaagctttcccggtacacggtcatgtacagggaatacgggttgatgagcgttctcctgtacagggaggaagccagcagcggccccaaaatgggaaccacccccagcacgaccacggcagcgaaggtccaccccctgcggcggccaatatacgcatcataccggtccacggactgctcaccctggagcaccgccttgccgcaggcggggcaacgctggtcaagagagggctcacggagaggctgcccgcagtaaaaacaccgccggtaactgcggagaacttcctcatgccttttccatccggagggaggaaccacagtgcgcagcctggaatatcctatccagttcagggcacggggggacggattgggcgtgccgcactccgggcagtgcagcccgcacgggtacatcatggagccgcatttggaacagaaaatacggtgggaatattcccggcggcggcaaaaaatgaagaaagccccaagccccagcccccccagcagggccaggatgatgactacccccggatacaggagggaataggctaccaggtattccgaccaggaatggtccgactggtgcatgagggattccggaccgatgggattttgcgccacgtccggaagctggcttacgtatttttcacccatgtccctcagaggccccgcgggaagccattgttgtatgggaatgggttctttcatgactggacatgcagggttcgccataaaaacagcatttcccgggaggctgtcagaaaacggcggcattcagcataggatgtctccgccggaataggtaggggaaaataggccatgccggaaaattccgccggaaatggggaagaggcccttttcatccggcgcttttccgtgtaatatttctgccatgccgactctccgccaagccgccaaggacgacatcacgctgatccatgaactggcctgccaggcttttccggccacataccgggacctcctttccagagagcagatagatttcatgatggactggatgtattcccccgccaacctggaaaaacagatggaggaggggcacgtgtacttcatcgcctcccatgagggaaaggactgcggctacctgtccgtccagccggaaggccccggcgtcttccatttgcagaaaatctacgttctgcccggcttccagggcctgcatataggaagctttctgttccgccacgccatcagctacatcagaagcatccacccgggaccgtgcctgatgcgcctgaacgtgaaccgcgataacacccgggcggtggaattctaccagcgcatgggcatgcggaccctggaacgcggggatttccacatcggccacggttactacatgacggactacatcatgggactggatatagcctgaaacgcctctccctcagggaaaaaacagccaaatcttcccagggcagggagtgccccccgccccccatccccggcgcatgcgggccgttgaacccttaggaaactccagttgaaaattccgcttcctccttgacactcaatgctgaattcttcatcatccgttccatgaacgcctttcctgcctttattttatccggtatcatcgccgccatggcggttcccacctccgcccaggcggcggaaagcaaagtcacctatccagccttcaacgacggcagccatatccacgggccgaaactcaaagcttccgacctgaaagggaaagtggtattttttgaatactggggcatcaactgcccgccctgcatcgccagcatgccgcatctgcaggaattgcaggaaaaattccagtccaagggctttactgtcataggcagccacagccagctcccgtcccccagggtcaaacagtttctggaagaaaagaagatcactttccccatctatcagagtctgagcattccggaggctccctgcccgggcggattgcctcatgccgttctgattggagccaacggaaaaatcgtggccaagggctatcctccccagctctatgacctggtgaaaaaggaagtgatgaagatggaacgcggccttcctattctggaaggagtggaactgaacaaatacaaatcgctggtcaaaacggtcgtttccaccggcagcaacatcgaatccaaaatcacacctctgaggaaaaaaacgaatgacgaggaagcgcaggccgtatgtgaagcttttgacgcatggctggaaaataccaaggaaatcgtgcaggcccggatccagtccgaccctctggaagcggtaacggccatcatgcgcctcaaaacggcggttccctccgtcaaggaatttgacgaacctctggcggccctgaaagcgaacagggatttatcaaaactggccgacctcaataaaaaaatctccgctctggaacagcgcaaggcaaaagggcgcaaaatatcggaatccgaccttaaatccctgacgcaggccgtggacaaattcacggagtccgacaacgaagccacgcaaaccgccgccgccagcctgaagaaaaacctctcctctctggccgctccggaaactcccggaaaataaccttcccctccaacagccatttcctgccggcaggcgtctaagggcgcctgcttcttttttcaccggacgcctctttcttcttcccctccagaacagacggaacagccagaatggagcatgtctccctgacaagggaggaaagggtccggtcatcgtccagctccgtcaccaggaaatgcggcctggcgccgggataggggcagccctgctcctgttgcggaaacatcttcaaacccggctccgttatattgacatacaactggttgtcacacaccaaaccgaagaatgtccggccgcagtacaatccgtagtccccaaacatttttctgaaggaaatatccccggcatgccggagctggaaacaaatatattctactacatccggggaagaggccatgacggactctctcatgccacccccgtccgctgcaagaagcaaatgacggccggtaaggcttccggcaggaatgaggcatccccgttattgacgagaaaaggcgcgcagcatgccccacggagtcatgacggacggcatccatgccgccgcagccgctccgcaagaaaatccttcccggcgtctgcccggcaagacatgaacggcagcatcgattccgtccgcacagagccattcttatgattgccctaacggagctttttattcatgatgcccatgaaccttccatgaccgccgcgtccgacatcctctggaaaccagcctgcctctcccgccaggaagcccccacccttacggaaggggccggaacctgccggccgggaaacggtgaccgaaacacctccgcgagccgtccggaaaaccatgaaaccatgggagaaaaagaccctgcggagaaccggaaagcgccccggccgcgaagcgggcgcgtcatcctgctcaacggagcctccagcgcgggaaaaagcacgctggcccggaacttgcagcttctgctgaaagaggcagctatgattttctccatggacgattatctggccatgagccggggaaaacatgaaaccgccctggatgccgtcagggaatccggcctgcccttcattgaatctttccacgccgccattgccgaggcggcccggaaaggcgccctggtcatcgtggaccacgtcatcggagaatcccgccgctggattcaggacctcttgaaccgcctggacggcatcccccgcatcctggtcagggtggaatgccgccaggatgttctgctggagcgcgagcggcgccgcactgaccggactcctgccccggcccatgcccagcgccagcacgcaggcatccaccgccatttcccgcatgatttctccatagacacttccgcagacactccccggaaatgcgccatgcggctcatcagcctcctgccgggagaattcctgccctgatgccgtgggaacagacggaagcctcccgtttgaaaaaacaggctgttcccgcaaacatgttggaaagacatgaataggactttacagagccgtctccttcacggtagcctgtgcccgcgcttgttgcacggagagatggcagagcggtttaatgcagcggtcttgaaaaccgccgtggggcaacccaccgtgggttcgaatcccactctctccgccaaacttcttttatgccgggcgcaagccatgcctgttttcacggaacaaaaaaaggcaggcgaatacgacggccgccccggcattcccggaacgaccctgagtgccttattgatccttcctcctgcctaagactccccattcagttcccggcggatgtattccgctgtgggggattctttcttggctatctgctccggcgtgccttccgccacgatggttcctccggcatcgccgggtccggggcccatgtcgatgacgtagtccgcctccgccatgatttccgtgttatgttcaatgacgacgacggtgttcccctggtccgccaaacgatgcagcacgtcaatgagcagccgcacatcccgcggatgcaggccgatggagggttcttcaatcaggtacaggtctccgggcagttccctgcctttcatcagggcgttccggctgacgcgccggcccttgatgagttccgtcaccagcttgagccgctgggcttccccgccggaaagcgtgttggaggcctgccccagcgtcagataacccaggccggtttccgacagcagtttgagggggtccgaaatgcggggctggctttcaaaaaattccgccgcttccgcaaagtccatctggagcacgtccgcaatggtcttccccttgtacctcacggtcagggtggcggcgttgtagcgcttgccccggcaggtctcgcacggcacatagcaggggggcaggaagtccatttccagcttttgcatgcccgtgcccttgcaggattcacagttgccctgccccgtgttgaaggagaaacggccgcggtcaaagcccagcctgcgggcatccgccgtctgcgcgaacagggtccggatgtcgtccaggaaacccacgtaggtggccggggtggaacggggcgttttgccgatggggctctggtccacgccgtacaccatgcggatggagtcaaagccggaagaggttttccataattttctctgctccctcgtgagcttgtcgccgatggcctggcgcgcagccagacggatggttcccgtcatcagggaagttttccccgctccggatacgccggtgagcaccgtcagcctccccttgggaatggcaacgttcacccccttcaggttatgcaggcagcagccctccacgcgcagccacgcggattcatccttttgggacggaatcctgcgccttttcccgcggtagggatgcctgggcttatggtgcagggccgcgcccgtgacggagtccggcatggcggccagttcctcaaaggtgccctgggccatgattctgccgccatgaatgccggctcccggtcccatgtccacaatatggtccgcgcgcctcatggtatcttcatcatgttccaccaccagcagggtgttgccccggcgtttgagttcatccaacgtgcccagcagcaattcgttgtcccgcggatgcaggccgatggtcggttcatccagcacgtacagcacaccgcggaggtgggaacccagctgggaagccagacggatgcgctgggtctccccgccggagagcgtcgtggcgctccggtccagggaaaggtagcccagccccacccgctggaggaagttgaggcgctgcgtgatttccgccactacgtcacgggcaatgagcgcttcctcccgttcaaattgccaccctttgaccagttctgcggcggccacggcaggcagggaggcaatgtcaccgggagtcactccctgaagccgcacggcgcgagcaaattcattcaaccgcacgccccggcaggcagggcaggttgttattcccttgtcatcgtccgcctgccgcgccagttccctgtcatatttcagttcagcctccagcagggattgcgcctggtcttcctttactttccccctgccgacgattccatgcccgcggcatacggggcaccacccgcgcggagagttgaaggaaaacgtgtacggttccagttccgggaaagattgcccgcaggaggcgcatgccagcctggtgcccatcagttccggacggacggaaccgggcgggagcacctgcaggaacccttcccccatctccagcgcggcatgaaccgccccggcaagcttttccggcggccaggaggcctccggccgtgcaacgaccaggtccaggtcatggctggaatagcggtccagcggctggaatccgctcaggggaaccagtttgccgtccacccacatttcctcatatccctttccttccgcccagcgggccaggtcggcgtaatgccccttgcgtcccctgacgaggggggccagcaacgcgagtccgccatgttttttcagttccctcgccaccagctccaccacttccgattccgaccttttgcccaccggaacaccgcactgcgggcaataggcctgccccagcttggcatacagcagacgcatgaattgccagatttccgtgacggttcccacggtggatttggtgcccccgcgggacatgttctgttcaatagccaccgtggggggcaatccggtcaggcggtcgatgtccggactttccagctgttccgtgaattgccgggcgtacggggacatgacgtccatgaaacgccgctgcccttccgcgaaaaagatatcaaaagccagggagctcttcccggagccggaaagcccggtcagcacggtcatttctccgcgaggcacgtccaggtccacgtttttcaggttgtggtggcgcgctccccgcagggccatcacgccttccggtatatccatgtctgcggattccgggacggcggcgtccgcagggtcgtaaacggaagggttgccttccagaacctccctgaggtatttgcccgtgtatcccttcccggcggctacgatttcctccggcgtacccgtggccaccacatggccgcctccggcgccgccctccggccccaggtcaatcacgtagtccgcggatttgatgaactccgggttgtgttcgatgaccagcagggtatgcccctgctccaccagttcccgaaacacggccagcagaacttcaatgtctgcaaagtgaagccccgttcccggctcgtccagaatcagcatcttggagctgttcgcgccggaacctatctggtccagcagaattttagccagcttcaggcgctggttttccccgccggaaagggtattcagaggctgccccagggtcaggtgccccagccctacgcgctgaagcacgcccagtttggaagcgatgcgggaggctttggcccctttttccgcgctgaagcattccagcgcagccgctaccgtcatgccgagcacgtccgcaatattcctgccgtcacggtacacgctcagcacttcgctcccgtaccgggagccgtggcacagcggacactgaacgaaaatgtcggaaagaaactgcatttccactttctcactccccatgcccatgcagcgcggacaccggccgtccccactgttgaaagagaaaaaaccgggcttcatgccgcgcgcgcgggccgtctccgtttccgcgaagagggagcgtatttcttcaaaaactccggcatacacggcaggggtggagcgcggggtgcggacgatggggctctggtccaccatcaccacctcatccagatgttcccagcccttgatagacttgacgcgggcgggttcctcctcgcatacggctcctttctccaccagcgcgttcaggtaaagaacatcgtgggccagggtgcttttcccggacccgctgacgcctgtcaagcaagtgaaaacgcccaggggcactttcacgtccagtttgcgcaggttatggcgcgtggctccggatacggtcagaaactggcgcggctttcgcctctttttgggcaccgcgatgcgtcgcctgccggaaagaaaagctcccgtcagggattcctcaatttctccaatccgggcaggcatcccggaataaacaagccttcccccttcccgtccggaaccgggtcccatatccaccaggcagtccgcggcacgcatgaccgcttcctcatgctccaccactaccagggtgttcccgcgctttttaagccggttcatggcggaaatcaaacgggacgtatcgcggggatggagcccaacggtaggttcatccagcacaaacagcgtatccgtcagggaagcgcccaggcaggtcgtcaggctcacgcgttcaatttccccgccggacagggatcgcgtggagcggtcggacgtcaggtagcccaatcccacttcattcagatactccaggcggctcctgagttccgccacggcatgtttcaagccggggtcttcatccgcccgcggcgtcacgtacctatccacccaggccagcagttcatccatgggcatactggaaagttccggcatgcttttgccgcccaccttgaattgaagggcttccggcctcaggcgcaaaccgtggcaggaggggcattcctgatatgtgcggaaacggctcaggtacacccgcacgtgcatcttatgcgtgcggctttccagatatttgaaaaatcccgcaatgccgtaccacagcccctgttcatacatttcatccgggtcatcgccgtcgccgtacagcagccagtcccgctcccattgcttcaaatccttccacggcacatccagacggactttgcgggcgtttttgcgccagccgcgcatcaggtcccgcttgcattcggaaaatacttttccgtccccctcaaaaatatggatggccccgtcctgaacgctgagttccggcttgatgcaccgattgtagtcaatcgtgatgacgcgcccgtagccgcggcattccgggcacgcccccagcggggaattaaaagaaaacaggcccggccgcggttccatcagcggatgccagtctccgcggaatttcaaagcggacaaccagacgccgtccacacggggaatcacatgggccacgccgccgcccaggcgcatggccgtttccagagcctccagcctgcgttccctctggtcttccgacagcctcacgcggtcctgaaccaccagcagcggttctccttcctccagcgtccaatcctcatcctccagccggaggatctctccatgcgcaaaagcgcgcaaatacccctgtgccaccagattccttttcaacgtgggaagatccacggattcgggccgcgccacctccaggcaaaccatcacttccgttccggcagggaattccgcatgcagcttttcatcaatggtacctggcgtttccggcttgatttcccgccctgtttccgggtcaatgcccacggccagacgggcgaaaacaaacttccagtaatcattcagccccgtcatggtccccaccgtggagcgggatgtcctgacggagttgcgctgatgcagggcgatggccggaagaatattctctacggagtccacatccggcttgtccatgcggtccatgaactggcgcacgtacggggaaaaggtttccatataacgccgctggccttccgcatacagcgtgtgcatggccagacttgttttccccgatccggaaggacccgtcaccaccgtcagccgccccaggggaatgtccacatccacattctgcaaattatgctcacgggcgccgcggatgcggatgcgcccatcctcacaatgactcatggagaaagaatatcatcaatttggaatcattccaagagaagcgcctgtcatgaatccgggtttccagaggagtccggccaggtccaacctgcctattacgtcatcatcagcacaaatggagggccgtgcttgcatttctcccggtagccgctagtatttttcgattcttagaccgctgaaagcgactctacctcgtcaattttcaacaagacaaagatgattaagtggattctaaccaagattgtcggcaccaaaaaccagcgtgaagtgcgccgtctgcgccccattgtggaacaaatcgtctccattgaagaatcatggaacggcaagggacaggaattcctgcttgagaaaacgagggaatggcaagggtacctccatcgcttcctccccatggatctgccccccgtgcgcattgtggaagccgcacccagggaagagctggaggaaatagccgccaaactgaacgcccgttttgaatccctgaaaagcgaattcgcttccctccccgcggtggaagccactcccgcctccattgaagaagggaaagccgcctggaacaacattacgccccagtttgacaagctgcgcgaacgctacctgaaccagatactgccggaggccttcgccgccgtcaaacacggcgcccgcctgctctgcggggaagaacgcgatatctgcggtcaaaaacaggtttgggacatggtccactttgacgtgcagctgctgggcggcattgccctgcaccgcggctacattgcggaaatggccacgggggaagggaaaacgcttgtcgccaccctccccgtttacctgaatgccctgaccggcatgggtgtgcatgtggtgaccgtgaacgattatctggcgcgccgcgactcggaatggatgggcatgctcttccagttcctggggctgactgtcggttgcatccagagcatgatgccctcccagctccgccgggagcaatacgcctgcgacatcacttacggcaccaacgccgaattcggcttcgactacctgcgcgacaacggtatggcaacctccaagtccgaacaggtgcagcgcgggcactacttctccattgtggacgaagtggactccatccttattgacgaagcccgcacccccctcatcatttccggccctgcggtcgtcacccgggaacagcagtacgataccctgcgccccgccattgagcgcgtggtgaaggcccagacggacctttgcaacgaactgatggcccaggccctgaaagcccaggaagaaggccgcacggaagaagtgggccgctgcctgttcaaggtaaaaatgggccagccccgccaccgcgccttcctgcgcgccatgcaggatcccgagctgcgccgcatcgtggaaaaatatgaactgaccctttaccaggatacccgcaagaaggaactctacaagctgaaggaggaaatgttcttcaccgtggatgaaaaaacccacgacgccgacctgatggaaaaaggccgggaagtcatctcccccggccatccggaagatttcgtgctgccggatctgggaaccgcctttgcggaaatggacgaagatccgcgcctgacggaaaaagacaaactgcgccgcaaaaatgaactgaccaaacagcttgacgaaacgggagcgcgcctgcacaccacctcccagctgctgaaggcctactgcatttacgaaaaagacgtggaatacgtcgtcaaggaaggcaaggtcatcatcatcgaccagaatacgggccgtgaaatgccgggacgccgctggagcgacggtctgcaccaggcggtggaagccaaggaaggcgtggaagtggagcgggaaaaccagacgtacgcgaccatcaccatccagaactacttccgcctgtacaaaaaactggcgggcatgaccggcacggcggaaacggaagccgcggaattccatgatatttacaagctggacgttcttcccatcccgaccaaccgcccctgcatccgcaaggatcagaatgacctcatcttcaaatcccgccgtgaaaaattcaatgcggtggtcaacaaaatccaggaacttcacgacaaaggccagcccatcctgatcggcacggccagcgtggacgcctccgaaacgctctcccgcatgctcaagagggccaaaatcccccatgaagttctgaacgcaaaaaaccaccagcgcgaagcggaaatcgtggcgcaggccggcaagcgcggagccgtcaccgtctccaccaacatggcgggccgcggcacggacatcaaactgggcgaaggcgtagccgacctcggcggcctcttcgtcctgggtacggaacgccatgaatcccgccgcattgaccgccagctgcgcggccgctgctcccgccagggggatcccggcgcctcacagttcttcatctcctttgaagacgacctgatgcgcaacttcggcgcggcggaacgcatgaccaagatgatggaacgcctgggcgtagccgacggtgaagcgctggaacacagtttcctgaacaaatccgtggaatccgcccagaaacgggtggaacagcgcaactacatgtggcgcaagcacgtgctggactatgacgacgtaatgaacaagcagcgcgaaatcgtttacggataccggaatgaagtgctttccacggaaaacccgcgcgaaatgatttacgatattctggaagaagtaatcgccacgcgcgcccatgaattcctggacccggatgcggaaggcgtcacccacccggacgaattgctcgcctggatgaacgcctccttcccgctggggctcacggcggaggccgccaagctggaagaacggcccatagacgacaccattgccttcctcattgacaaggtcaagtccacttatgaagacaaggcttcccgcgaacgcccggaatacctggaccacatggaacgccagatcatcctgggggccattgacaaaatgtggcaggaacacctgtacaacatggactccctgcgggaaggcgtgcgcctccgcgcccaggggcagaaagaccccctggtggaatacaaatcggaagcttacgatctcttcatcaccctgatggaaagcatcaagagcgaagccatcagcaacctcttcaagagcaccaccaacctggacgcctttgaggacttcctggccagcctgccccagtttgaatcttccgacgaaaaccaggaaggcggaaccagcctgccggaaatcggctttgacggcatgccttcggacctgctctccgccctgagggaacaagtctcccgggcacgtgaacaacaatccgcccggcaggcggaaccggaacaggccccggccgtcatttccgacgccaccaccattggggaaggttacaaaccagccgtggcggaacccaaactggtcatgcccaagcgcaaggtcagcgtcgtgctccgcaaggaagaagccccccaggcgccggcagaaacgccggtccccggagaaggggaagaaattgccgtcactctggactcccaggactttgcggaaaccatggacaaccgggattccgcggatacccgtacattctaaaaaagccgcgcatcacttacaggccgggggaaacgggaatgtccgtttgccccggccccaaacttccggtccgccttggctacgctccctcccaacaaatccgccaatgtccgttccgtgctggagtatgttccgtacttcagggataaaatctttgccgtgcacgtggaacgccccctggtggattccggggaattggtggatgccctgctggacctggacgtactgcaggaaataggcgtcaggcccgttctgattgtggaaggggcggacgcctccgcgctgtacgaacacacgcgcgtctgtgaaatgcgctccgccctggtggaagcgccattgaagggcggccagcttgtccgggaaagagtccgggaaattctggggcgtcaccaaattcccgtggtggcttccggccgttccggctcctttgacccggaatccgtccatatggccttcagtctgggggcctccaaatacatcgccctgctcaatgaccacaaggttccgtccctggacggacgccccattgccgccattctggaatcggaagtagcggagctggcaggaaacgtaacccaccgcgaactgcttgaccaggcagcggaagcctgccgggcgggaatcccccgcgtgcatctgctggacggaaaaatgcgcggcgtgctggtggaggaactcttctctgaagaaggcgtaggaaccatggtccacacggactcctaccgggaaatacgcccgctgaaggaagaagacattccggaactcctctccatgatcgcccgttccgtagtggactccaaattggtcaaccggaactatgaagacattgccgccagaatagacagttactacgtgctgaccctagacgacagcatcgtgggctgcgttgccgtttatccctacccggagcaccatagcgcagaactgggctgcctgtacatcaagcaccgccatgaaggccgcggctatggccgcgcactatgtgaatttgccaaaagaaaagcggaggaaatgggaatggaattcatctttgccctctcccaaagcgccgtccattacttccgggaccgcatgcattacgcggaattttcccgcgacagcctgcccccggaacgcctgcgcactctggaactcagcgggcgcaaatccggggttttcgggttaaggctgaaatagttttctatttacctctctgccccgttcctgcttatgggcggaatcccctgcaccaaatggacgggtagctattcccgtctctcgttaaagggtatatagtaaattcgggaaaggtcttccatttttcttttcctcctgaaattttctgcccgccgaaaaaaatatcatcaacaataatttgataataaaaatcttataaaataaccacataactaaaaaagaattatgcggatttttaatccgtccccggctacggcttctccgagcctttcgggtttagctgctctgatgatgcgctgcagcatctaaaacccatttccctcccctccgccgcatttccaaaaacaatgcggttttttattttccagtacctgtccggtatcggagccttcacttcatgcggcatcctgaacggcaaaatcctgagaaaagaaaacgcagcttctcacaagcgggattccaatccaacattcatatccccgtgtggatatatgcaccggaataacagtactccacggttttccagagcggaaagtgccggggggaggcttccaattgtcaatcaagctgtgcatcattgtgcatgcttttttgaccatatgataccctttttcactgttttccagcatgatgtgcaatatatgcactaaaagtaacaagccccttaaaccgttggatttaaggggctttgaagatggtagcagggaggtgatttgaacacccgaccaaaggcttatgagtcctctgctctaccactgagctaccctgccgttaagtggttgatgccgtaaggcggggaaatatttaacccggatcggaaagaatgtccagatttttttatggatcaggagcattttatcacggcaacccgccttcccctccagggaaatcattacggatgaagcatttttcactcaaccgtttcatacagcctgtgtcccatgccgtttcctgcatgcgggcatttacggcacaggacattatgatgccttctgtcccatgccattgccgcagcaggacaggaaatagaggcccataaagattttcgggtccaccacttttccctgtcccatctgctccatcagccagtcatgcacctgaggaagaggaatgcggtgcacagtaatattttcgtgggccacaccgcctcctgccgatattcgatgcaggtcttccgccagatagaaggataccatttccgtagtcaatcctggggaagaaggccccgcaaaaagatacgtccaggagtccgcccggtatccggtttcctcttccagttcacgccgggcggattgcagcgtgctttcctccccttcatccccggaaatgcccgcaggcagccctacggtccgggcatgcaggggaacgcggtattcttccaccagcagcagttctccttctttcgtcacggccacgatcatgacagctccgctggcattaacccggcgcacgtattcccacctcccctctttcagaagttccagaaatttcccccggtagagagacaggcatgcttcccctggctgttccatttgttccatgatgcagccacgttaggtttccggacggccgttgtcaaccatgcggaccgcctccctcctgcatcttcccggacagttccgttccggtccctgtaagtggttgatttccggcggcgtaatcatgcacttttcgtcacccaggccagtaacaaaacaacaacacattgatgatgagtaattaacaatgtcatacagaaaatatactcaggaggactaaattatcggaggaagcaagaacaaaatattttttcatgtggaacccccgtggaacgtagagccgcagaacgatgactcgcgctgtttcaaaaagatattttttcctcagacgcaaatcagtaatttggcgctcccgtcaaccggggtgttgagctgaaagcggatgagttcgccttctccaccccgatggacgccacgagctgtcacggctgcggatgaacctgatccggttccatccgcgggcggcctcgtagcgggacggaacgccttacggctatttctaaccagcaacatcttttatttccaataacaatgacgccgccatcagaactgtcagccacctggtccaaaatcacgggagccttgcaaacaatcatgtccccggaggtttatggattgtggtttcccaagttttccctgctggaggattcagggaaggcgctgacgctggtatgcgacgatcctatggccgccctctgggtggaaaacagctatacgccggagctgaagcaggccgccatgctggctctgggcacggaacgccagatcaagttcgtctgcacggatgaagtggcttccatgcccgctgcagaaggccagccgcaaaaagcttcttcccgggccaaaacgccgcaggcggcggattccccggccgcaccggtcaaaaaacagcgtacaccggccgccaaggcatgcctgaatgacttatatacgttcgattcgttcgtggtgtatgaggacagccgttttgcgtaccaggccggactgtccgtcgcccagtcggaacgggccctgttcaatccacttttcctgtacggtaaatccggcgttggcaaaacccatctgctccaggccattggccatgaggtgctccatcaggattcatccacaaatgtggtgtacgtcacgggcgaacagttcgccaatgaatttattgacgcttcccgaacccagaacggacaaagctttaccaaactgcgccgcaagtaccgcaaggcagacgtcctgctggtggacgacgtgcaatttatctccggcaaggaaaaaacggtggaagaattcctgcatacgtttgacgaactgttccatgcccacaaaaccatcgtgatttgcgcggatgccgccgcatgcgatatttccaatctggacccccggctggcggcgcgcctggaatcaggccttacggtagaattgaaccttccggacgacaatgcacggctggagatcctgcgcagcaagcgcgaccgggccggcatgaacgtatccgacgaaattctggagtttctggccagccgcatccagaagagcgtgcgccggttggaaggagcactgctccgtgtagccacctttacttccctgtcaggagacatgcctgacatcgccaaaattgagcagcttttacgcgacatcctgcgggaagaaacaagccgcatcctgaccgtagattccatccagaagcgcgtggcggatttttacgaactcaaggtcagcgacctgaccggcaagcgccgccccaacagcatcgcctttccgcgccagatcgccatgtacttgagccgccgcctgacggaacgctccctgaaagatatcggccaggcgttcggcggccgggatcacggcaccgtcatccatgcgaacaagctggtcgcctcccgtatggaagaggatgtgcgcgtgagggatatcgtccagaggctggaagaggagttgagggattgattttccttccctccagccctgctggaaaagcatggtcccgttgaatgcccatggcttttcaagcggaagaagcgcttccgcggcgcaggggagaataagcttgaggcgaaagcggtttggattagaatcaccctgttcccattgattccatgatccacgccgaccagctttccaaagagtttggccgctttcaagcggtaaagaatgcctccttccagattgaaaagggggaaatcgtagggttcctggggccgaacggcgcaggcaagaccacgactttgcgcatgctgaccggctatctgccccccacttccggcacagccacgattgccgggttcgacattgtgaaaaatcccctggaggctcgcaaacatctgggctacctgccggaacacgtgcccctttacgacgaccaacgcgtcacggaatacctgaaattccgcgccaggcttaaaggcatctcttccaggcagatctggcctgccgtctccaaggttgtagaacaatgcggcctggatcccgtgcgccgcaagatgatccgcaccctttccaaaggctaccgccagcgcgtaggcctggcggacgccctgctgggggaaccggacctgctgatccttgacgaacctaccaacggtcttgaccccaaccagatacgccagatacgcgaactgatcaaaggtctggcggccaaccataccattattctttccacccacattctcagtgaggtggaaatgatttgcaacaaggtcatcatcattgaccagggaactatcaaagcagcggataccccctccaacctgacggccaatctacgggcagccggcaagattactctggaattccggggagacctggccctgattacgcggaaactggaaaacctggaacatgtgaagaaggtcatccatgaaggaacggacgccgacggctggcatacgctgaccgtacgcgcggaggccgggacggatacccgtgaaaaggctgcgcgcctccttgcggaacagggctgccccctgcgccatatttaccgccacacccccacgctggaagaagtgttcgtggaaatgacccgtaaagattaaccccccctttttccatccccgcctatccaccaccgcccatttcccttttctccccatgtctccagtacttaccattttcagaaaagaactcagaagctacgtaatgactccgtacggatgggttatcctggctttcgtcatggcccttcagagcgtctccctgtccggcacgctgaaggcttttcaactggccccgcagaaggaaggcatcctgttcttcatcctgcattctcccatgttctggttttacttcctgttcatcttccctctgctcaccatgcgttccctggcggaggaggaaaagacgggaacactggaatccctgctcaccacgcccatcaagacatggcaggtggttctgggaaaatacttctccgcatacgccttttacatcatcctgtggctgcccatgcttctctatcccatcctggcggactggtccaacctgattgtgcagtggatttacggatatgacgcgggcatggttctgccttaccgcctggcggactgggccggggcatacgccattctgctgctggtcggcacctggttcacggccatcggcattttcgcctcctccatgacgggcagccagattatttccggcatcatcaccatcggcctgctggtcctgattttcttcatgggtctgattcccgtggtgtggggggaattccccgcagcggggattttccactacatgtcctgctcggaacatctggaccgcttttccgccgggctggttgacacgcgccccgtcgtgttttacctgaccatgacagtcctgacgctggccgtcaccatccgcatcattgaccaccgccgctggaaacactgactcatccctccttcaccacttttcatttttatctatgagcgaaacaccagacacccccgccgcggccgcagaagcctcccagcccgccgcccgcaaggtcaaacgcccctggatgacctggatcaagcttttcctgctgttccttatcgtcgtatgcctgaattacgtaggctgccacgagtattaccgccgggacctgacggaagaccagcgttatgaaatttcccgtcagagcatcaacatgctccagtccccggaaatccagaagcgcaaaacccccgtcaaaatcacgttcgctttcctgcgcaccacgcagaactacacccgcatgcgttctctgcttgaggagtacgaacgttattccaacggcaaggtgaaggtggagtatgtggatcccctccgccagccgaacaaggcccgtgaaatctccaatatctacggaattgaattcaagaagaacctggtcatcattgatgcccgggaggatacggaaaaagcgctcaagacgtttgaaggcacccaggcggacgccgcccacgtgcgcatcctgcccggagacgccttcgtagtatacgcacccgggccggacggcaaaagcatgaaggcagtggcgctccagattgaagacatgatgactgccggcatttacggagcggccaacggcgaacctcgtaaaatttatatcgcggcggataagagcaacttcaacgagtccctgagcaacaaccaggaagaaagcattttcacgacgctgggcaaaatctgccgttccgtcaacctgcagcttgttcccatccgcatgagcggtctggaagaaattccggaagacgccgcaggattcatgattatcggttccaaatatgatctgtccccgcaggaggcggaagtgctccagcggtactgggcgcgcccgaacgccgccattctgatcatgctggaaccccagaatgacacccccaaacagctttaccgctttctccgcgaacaggggctgcggccccagaatgaccgcgtgatgctccgcaacaggagcaaccgttccgtttttgaaattaactccattttcgccccctccctgaattgcacccgtgaattctggaattccagcaccggactggaaggggagagcatctccctcattctggattccgacaacgcggccatggaacagaagcgcattacgccgtatccccttctggtgactacggaggattattacggagaaaccaaatacaaccagttcccagccaagttcgacgcaagggaagacaatccggggcctctgatgatcggcgcggcccttatccgggggaatgccggagacgtgaaccagaacaagactaccggacgcctggttctgcttggcaatacggacctgcttcagccccggcaaatcaaaccggagcagagggatttcatgcgcacgctgatcggctggatgacggaccgtgaagaattgcgcggcctcggttctcgccatgacctgaccgtcaagctgaatctggaccgcaacgccctgggcgttttggaactcctgacgaatatcggccttcccctgctggcgctgctgatcgccctgattatctggaacacgcgccgtcattaaccccatccacgcccattaccggaagcacatgcgcacattccgctttatccttctcatcctcatcaccctcgcttctgtcggcgcggcggtgctcctcaccattgacggcaacctgtcccgcatcatcgggcgcaccgccttcagttccggagaacggcttttcccatacacccgggaagaaatgaacgaggtttcctggatgcgcatcaattgcgtgggggatgtcgcggaattccgccgtaagcccaacggcgtctggtggtgcgaaaaaccctggaacgaccgtatggaccctcgcgcggcggcggccattctccagtacacgtattccaccagcattgtggacgcgctgcctctgcacaaaattgattccgcttccctgaaggaattcggcgtaaagaccacccccgttaccatcactctcaaggaaatgagcgacgacggaaagcgttcctccaccgtagcgcgctatacgctgggttccccggcgccctggctggtggacgatccggagaacaagaccacggatgacaccacctatatgcagacggatttctacggacgggacacccgcattctggtgggcaccggcaacatccttcctctgttcaaatccggtatccgccagcttcgggaccatcgtcccctgctcctgcatccggccatgcccgcctccattgaaatcaacaaccggggccagcgcatcgccctgaaacgcgagactcccggctctccctggaaaatcacgtatcccctttctctggatacggatccggccatgatggatgtgctgctgggcacgctccaaaagctgaccgccgttcgcgtgtacaacccggaggaaacaagcgtaccggacatgacggatgatcagatcacctccgtttccatcaggaatttcacaggccgtctttcagaagacggcaaatccctgcaaatggaggaacagcccgtcacgctccggatttatcccccctccgacaacggaagcctgtccgaactggtcaaggccaccgtttccgaccgcaaggccgtctttgaactggctcaaacgacggaaaccaacaaggaaattcccggcgtacgcaatattccgctggatctgggccttttgcgttccaagcaattgacggacatcggggattacaaaattaccggcctttccatccgcaagagctttcaggattaccccaccatcgcccgcttcattcagggggatgagaaaaaaggcatcaagcccacctggctgtacacggcagagggcgcccgttaccaggaagcgaatccggaacatctcatttccctgctgaaaacagttaaacaggggaaagtggccggattcgcctcggacaaggctacggatctttccgtatacgggctggataatcccagaatgacgctcaccatgtcccttctgcccaagcccggtgaagagtcccgcccccccgtgacggtatttttctccaagggggcggacggttcctggtatgccctccaggccggaaaacccaccgttgccatactggacaacgcctacatgaaggatttgctgacggatgcactggcctggaaaaaaaagaggctcttctccttcagcaggtttgacctcagagaaatgcacctggaacgcatcggttccggaggccccctggtcctgaaattcgaccgtctggacgattcctggacggcctccaaagacggaaaggatgaaaccctgaatatcaacccgaaccgcgccaaccgctatctggacgaactggaaaaaatggaggtgagcgcctggcttccctatacggacgccacagcgcatgaagccctgaaaaatcccgttttccgcctgaaactcatcctccagtcttacaaggaggcgccccccgtgccaaccaaatccgggaccggcgacattacctttgccccggaaccggaaacggaggacaaagtcatcacgctggaaatcgccccggcgggggaggccggatacagcagattttattacggcagagtaaatacaaccccgaattattttatcctgaacatggacgccgtgcgtttgctcggcgccagcctttcggaagataactaaccattcctcccgcatgagcaagattgagctgcacaccgccatctcctttctggacggaatcctttccgtggactccattccggacgccccccgcgccctgaacggccttcaactggaaaacggaggctccgtttccaaggtggccgccgccgtggacggctcagaaaaggccattcatgctgccctggaaacaggggcggacctgctccttcttcaccacggcattttctggcagcccatgcagcccattaccggcatcgcctaccggaagctgaaagccgccatggacgggaacctggcgatttacgccgcccaccttcctctggacgtccaccccgcatacggcaacaatgccctgctggcgaaggcctgcggcctccggccatgttcccatgatgggctggactaccacggcgtttccctcggtacgcacggagaattttcaggtacatgcgcggaattggagcaaaaactggaaaccgtcctcggcgcgcccgtgcaggccttctggaaagattccccggaggctccggccggagatgtcttcatctgtaccggaggcgcgggagatgatcttgcccaggcagcggccctcggctgccgcacctacgtgaccggggaaggctcccactggaacatccccctggcccaggaactgggagtcaatctggtcttcggcggccactactttacggagacgttcggcgtaaaggccctggggcttcttctcaaggatgtttacgggctggactacacttttattgacctgccgccctccgcctacagccattgaccaaactccacggaacatgaatctgactacggacgacgccgacgggaaaatccgcctggaccaataccttgccgcccaccttccggagctttcccgctccaggattcagaacctgatcaaaagcggggacgtgttggtcaacggctctcccgccaagcctaaaaaccccgtctcccgcggtgattccatcaccgtccgcattccggagccggaaccggcggaagcccagcctcaggatatccccctggacatcctgtatgaagatgaagacgtggtcgtcatcaacaaggaaagcggcatggtcgtgcatcccgcggccggtaacccggacggcaccatcgtaaacgccctgctccaccactgcggggacctctccggcatcggcggagtggaacgcccaggcatcgtccaccgcctggacaaggacacctccggctgcctggtcatcgcaaaaaatgacgccgcccatcaatccctgacggcgcagttcgcggcccgaagcacggaaaagcgttatctggccgtcgtccagggcattccttcccaaagttccggcacggtcttcacccatatcggccgccatcccgtcaatcgcctgaaaatggcagtagtcaatcccggttccgggaaagccgccattacggactacgatttgctctgcgcggacccgtccacggactcctccctggttctgtgcacgttgcacacgggcagaacccaccagatacgcgtgcacatgctccatctgggccatccgctcatcggggaccccatttacgccaaacccgcccggcaaaaggcaaaacccggcaggctcatgctccacgcgtggcggctgggcttcgaccacccgcgcacgggaaagcgcatggatttcgaagcgcccgtcccgccggaatacacgccgtggctccagctcttccccaacgggctttacggggccatcccggagccgcgcccggtacaggaagacggaggacggaactaaacctccccgccatttcccggcagcggaagccgcttcaacggacagaatacgggaaagcgccatattcaaatcccagagccggcccggccttcgtcagcaatccgccgtcatccggcgcccccatccttgcggacaaagatgcggcaatagacccgtcgttcaccttcttacgccccctttccggcaggagcgtctacggtcacagtcagccgggaacaatattcttttcatcaatcaaggagaaatgaacctgcccggcatcttccgcgcatgcaagaagaatccgcggcggagacctcccctttaatcttgatttgcccccccggaaccgctaccttgacacggctttaaccacacagctttcacagagacatggagaccacgcaccacggggaggacgcctctccggacaatccccccaggcagcaaaaaagcggaaacacggatgaacagaccatcgccctgacaaaggcgcgcctggctattgacgaggtggacgcccggattgtagagctgttaaaaaaacgcgccgaatgggtgcatgaagtcggccgcattaaaaaggaaaaaaattcccccatcttcgttcccgaacgggaaacggccctgctcaacaaattgaaccgcctgaatgcgggcgtgctgccggaagcctccctccaggctatttaccgtgaaatcatctcctgctccttcttcctggaaggcggcttgaccattgcttacctgggccccaaagggacctggagccatcaggcggctctcaagcagttcggaaaaagctgcgaactcattccgtgccagagcttcaaggacgtgtttgacatggtggaccggggaaaggcccagtacggcgtagttcccgtggaaaattcttcggaaggctccgtcaccgccgtgatggatcttttcgtcacctcacccctcaaaatctgcgcccagatcaatctgaacatccgcaacagcctgatggcggatattccgcgggaacacatccgcatcctgtattcccacccccaggtcctcggccagacgaggaactggatccagcggcacttcccgaacgcggaactcgtggaaacgtcctccactacgaaagccagcattcttgccaaggagaacgccgccatgggcgcggcgtccctaggctgcccgctggccgcggaattgttcggcctgaacatcttggaagaagacgttcaggaccagtcctgcaacaccacccgttttgccgtcatcggacgccaggaaacgcagcccagcggcagggaccgcacctccctgctcatccgcatccagcacaagcccggcaccctggcggaagtggtcaactgcttccagcggcacaacaataacctgatacgcattgaatcccgcccgtccaaagtcatcaactgggaatacgtcttctacatagacgccgccggccacattcaggaatcccccctccgggaaacccttccggagctggaacagcactgttccatgctgaaaattctgggcagctacgcggatacggacgtcatttaagccggttcagcctttccccccagcctcacaccatcctgaacaaccatgaacatagccacgattgccgccctagccgtcactctggggcttcccgccccagcccagcagtccgtcactaaaatcattacggaaaacgggcagccctctctggccctggacgaacagttcgcggcccggctgcgcggcggtggaacaaagcagaactccccggccaccgttcccgcggaattttcggcagccgcgcccggactccccctccccgcggatgccaaccatgccgcagtcagagaaacggcggaggaacgtaaccggcgcatggaatggtggagggacgccaaattcggcatgttcatccactacggcctgtattccggactggccggggaatggaaaggcaggcccggaggttccgaatggattcaaaaaaacgtggaagtggatacggacacctacgccgcggaagcccggcccctgttcaagcccagggaaggactgacggaagaatgggcccagctcgcccgggatgcggggtgtcaatatatagtgctcaccagcaagcaccatgaaggcttcggcctgtttgacagcgccttgacggattacgacgccaaaagcgccgtgaacagggacatcattcgcgaatatgtggactcctgccgcaggcgcggcctgaaagtgggcctctaccactccgtcattgactggcaccacccgtcttatgacaacaccatctgcccggatctctgctaccctgcggggcaggcggccatgcttaacaggaaaaacattccccgcgaccacgccgcctaccagaaatacctgcacgcccaggtccgggagctgatgacccgttacgcgcccatcgatatcatgtggtgggactactcccagggggccatggagggggccaaaggctggaaagcgccggaactgatggacatggtgcgctccatcaatcccggcgtcatcatgaacaaccgcctgtacgcctattccggcctgaacaaggaccaggccggaacgctggacctgcgctgcggggactatattactccggaacgcttcatcccccggcgcggatatcccggcgtggactgggaatcctgcatgacagtgagcgacaaatggggctacaaccgctacgacaccaacatcaagtccccggaaaccatcattgaaaaactggtggaatgcgttaccaagggaggcaatcttctgttgaacgtcaatcccatggcagacggcaccattccggaaaaagtggccgccaccatgcgcggcgtaggccggtggctcaacatcaacggtgaagccgtgtacggcacacgggcattcattcaactggaccagccggcctccatcaatcggcagggggatatcttcgtcttcctgattccgccgccggacaagggagcggcccagccgcccagcgaaggaaccatgaaagaactgacggcgggcgcggaacacgcccgcatgcagccgctggacgccaccggttatgaagatgatgagggaacggccatcaccctgcccgccggctattccaaagcattgcttttgggggacaacaccgtccttcccgtcgtcaacggaacggttctgttcaaggctcatgaacattccaaaacaccctgttccgtcatcaaactgagcaaatagccattgttcccactcatttgtcctatggaggaagaccttttttccctggcagccggcaaacagccttcacagcaggcaacgaatgaaacggcatcccgggctggggaggcgcgggaaaacgccggcgccggccaccccggaaacgcggaggaaaccgctccccgccgcatagactacctgcgtgccgaactgcgccgccacaaccgtctgtattacgaacaggcggaaccggagatttccgacgcggaatatgacgccctgttcctggagctggaaaaactggaagaagcccaccccgaactggcggatccggactcccccacgcgccgcgtaggcggcgcccccctccagggcttcaaccagatcaggcatgcggtgcccatgttgtccattgacgacatttttgagcaacgggacgcccccgtgccggatgaagaactggcggaattctaccataagctggccagggcgctgcaaacggagaaagttcccgtctccgtggaacccaagattgacggagtggccctttccatcatgtaccgcggcgggaagctggcttacgcggccacgcgcggagacggagacgttggggacgacgtaacggccaacgtacgcaccatccgcagcgtccccctcactctccctcccggcgcgccgcccgtgctggaagtgcgcggggaagtcttcatgcccaatgaagccttcgccaaactgaacgaagaacgggacgccgacgggctccccgccttcgccaacccgcgcaacgccaccgccggaaccctcaagcagctggacccccggcaggtggccgcccgtccgctggccttcctggcccatggactgggcgcgtatgaaggcccggaactcagggacgcaaaaggcttctgggacatgctccgccattgcggcatcccctgcaatgaaccggtgtattacacggacagcctggaatccacccgccaggccgtgcgggatattgacagcctccgccatacgctcccctacggcacggacggagccgttattaaaatcagttccatggctacgcgggaagcgctgggcactacggcgcgcgcgccccgctgggcggcggcgtataaattccccccggaacagaaggaaaccaccctgctgaatattatcgtgcaggtaggacgcaccggggtgctgacgcctgtggcggaattgcagcctgtgcttctgtccggttctacggtagcgcgggccaccctccacaaccaggatgaaattgaccggaaggacgtccgcatcggagatacggtgctggtggaaaaggcgggggaaatcatccccgccgttctgaaagtgaacctctccaaacgcccggcggacgccaggccctacagcattctggaagccacgcagggtctgtgccccgcctgcggcaatcccatcatgaaggaagaagggaaagtagcctggcgctgcaccaacttcacctgccccgcgcaggccgtgacgggcatcacccacttctgttcccgttccgctctggatgtggagagcatcggctcttccgtggcggaagcgctgagaagctccggtctggcatcctctgcgctggaccttttctccctgactacggaccagctcgccaacctgaacctgggcacgccggaggaaccgcgccgctatggggaaaaaaatgcccggaaagcgctggacgccctgcaaaacgcgcgagggcttccgctggaacgctggctcatcgccttcggcattcctctggtgggggaagttgtcgccaaggcgctggcggacacgcatcccgacctgaagcatgtggcggattctccctacctccgggacatcgtccgcctggatgaactgatggaaaaggccgccaaaaccaaccccaacacccgcggcaacaaaaaggcggtgaaggaaggcgcgctttctgcagaagcggtacaggaacgccaccaggaactgatggaggaaatcgaccgcctgaccgcgccctatctggcaacgggctacctgcgtaaaaacacggccaaattcagctatggctccgaaataggcgtggcggcggccaaatccctccaaagctttttcgcctccgcagcagggaatcacaccatggacgtcctgaacggattgggcatcaatccccagtcccagtcctaccgggccaactttctggaaatcccggcgggatccctgtccggaaaaaccttcgtcattacgggaacgctcagccatccgcgggactactttgaacagcttatcgcctcccacggaggaaaagctaccggggccatctccaaatccacatccttcctcctggcaggcagcggaggaggctccaagcgggacaaggccctcaagctgggcgtgcccgtcatttccgaggaagacttctacaaaatgattggaaattaattgccgcaaaacagcgggaacggaaagcagaaactgaaacgcgcgcatcatgcgtccggctgcctgtatcttcgtattcccttctcttttttccgtacgcctttttccggaaatttcattcctgaatccagcaaaaaagcttgctacgggcagacatctgtcccctaataaaccggtatgctgaacctgcccaatgccattaccctgacgcgtattgccctggtagtcgtctttacggcagcagtcagcgtcgcggaccagtattcctggggatacctggccgccctggtcacgttcattctggctgcctgcacggactggctggacggctacctggcccgccgcctgaaccaggtcactaccttcggcaagctgattgatcctctggcggataaaatagccgtctccgccgccttcatttacctgacgggggaagggctctgccccgcctggattaccattctcatcatcagcagggaattcctggtcaccggactgcgccagattgcgcaggatcatggcgtcatcatccctgcgggaacgtccggcaaatggaaaaccgcattccagctggccttctgcatcgcctgcctgctggccctgacatggacgcatacgccggaatacctgccctccatcgcggaccggctggccgcgctctgcctgtggcacggttccggcgcatccaacttgctgtaccaggttacgctgtggggctccgtcatcctgaccgtttattccggagccgtttactgcgcgggcgcccgcaaattcctgaaataggagggcatacgtcctttaccaccctttgttcatttcttcctcaatatccctccgggataacacccgggaacattcctcccactggtccgcttccggatccaggcggtcatcatacgtcagcgtgaaagcgttccgcgcctcgtcacgttcgtgaacgtatttatccagccgctcctgaagggattcctgctcatctatccacgcgtcatcaatcgtctccggcaaagacccgaacaaatcgtaaatattcttcatgcgttcggacaaaacggaataaatacgttcatccagcgttccccggtaaaccagattgagcatatccacgcactccctgctctgcccgaaccgcttgatgcgccccagccgctgctccatgcgggacggattccacggcaaatcgcaattaatcagcgttcccagagtctggaggttcaacccttcacaggcggcgtccgtagctaccacgacgcggatttcccggttcttcacggcgcgcttaatcggttcccgctcttccgcggcggaagaatggcccaggaacaggcggctgcgccccaccccggcgtacagggctaccggctcatcgcccaattccgccgccagccagccggctacatgggcggcggtatcataatactggctgaaaatgatgcagccatgttccagccagttttttccgtccgttcggaactccgtcaggaaccacctgattgtctccagttttttatcccgggcgctttcctgctccagcaggcggctcactgttttcaggcaggcttcttccgccggggaaagattgcttaaaaaactttcccgcatttcctcttcgtcatcctccccttccgcccaatcctcttccatggagccgcggcccagcaatttttccgcagtagaacgcccggcctcgtagctggaacagatgcgcttcaacagcagtgatttcataaatcccgcggacggcgtgcgcgccgccagcagacggcaaaattcctctgcggccgcataagcttcgtcaaaggaaggctgggtcggcaaggccagcccattgaaatgatacccgtatttcctcccggcgtcagcgtccgttcccagcggatgcaggcgcacccccacccgaaccagcagccccttctcttccagcatggaacgtttgcgcaacacggtgtacctcaacacgggattgtggaatttgaaccaatccctcccggcgcaggcgtccagggcggaacggaactcataagccccggccagatccctgtacagcgcgcgggagacaaaacacccgtcatcctctccggcggcatctctcaagtcatccagggcaggatcctcaaaacggggcggcatgggattgcacagccattgccaccgttcctcctccctcatgccgtcagcgcccgcctctcccgtcaccagcggcagggcgcgctccatatcgcgccatggggacagggcatcccccagcacatggggggcatccccgcccagggtctccagcaaatcccacagttcccgcacctgggtctggatcggcgtggcggtgcccagaatcatgtgccgggttctgcgccccgcgcgctccatgaagcgcagcaggttgtttttctttctgcgctgttccgtcccctgcgcccgggcccggtgcgcctcatccagaatcaccaggccgtacaccccgttcagcaacacctcgctctcacgggtaaactttttcgtccccgcgtcatactggtgcatgataatcccggtggacacaatgccgatgcggcacgggcagcggccgatgctcttcagatccttccggggggataacatgcggccgtccacgctcacccacgctttttccacggaagaccacacggcggagggcacgcccagcctgtccttcatttccacctgccattgaaacgtcagcgtagagggggaaagaatcagcacggggccgtcccccagcagggcgctgaccacggcgctccccgccatggagagggttttgcccacgcccacttcatccgccagcagcaggcgggccttgccgaacctgcggcggtcctgcaaaaaacggaccacgaatgccctttgccagggctggagctgctcgccgccgcggtagatcggcgcctccgccagggcggcccgcggcatggactccggcgtccgtcttgcctccgccaggggaatttcctcccgccgcgccagacggaacacctcctgcctgatcgcctccggcaaaggcacggccgtgttccacagggcaaaaaactcccgttccacccagtccgcgctctcctctccgtcatcagaccacagcagttcataattcctcttccagccgttcaggctttcattgacggaacccacaaaagcgcggcggggccgcccggattccggagagtaggagatgcagcccgccttgccgtgcaggaacattttttctccaggaaccagccgtatttccaagttcccctgctccagcatccgcgccagccggcggtactgctcccggcgcagcagggaggccatgccggggtcttcctcattccagcgggctttcagctccgcctctccccccgccgccatcagatccgccgcgtccaggtcggaattgcacagtattttcacctccggcacggcttccagcgcctctccggccacctcaaaaacggaactgcggaaatacccggcaatgcgcaggtagcggcgggcgcccttcagcgcctccgccagaaaatccccgtgcaaatccgccgtgcgggaactgtagcgttgcaggctcatcgttttccgtcagtttttccctcccccgtcaggcccggtgcgcgcgcagcgcctccgccagcacgcgggcgcattccgcctccttttgcggggtaaacccgcctttgtccgccctaccgccgcgcgcccgcgccaggaattccgccatgcccgccagcgtctcccgcagcagggcgtaacggccgcggcagtcttccgccagcgccgccagaacctgttccgcctcttctccctgccgcagcaggcgcatggcgttcaacagggcgcgcaggggggaaccgccccattcatcctccgggtcgcggtcgccgctacccagttcatctgacagcttcaggcgggcgttattggcgcgggattccgcgctcatcaggcgttcatggcccgccacgcgcagcgcgcgggccatgttggtgtacatgtccagcttttgggggccttcccgttccagggcggccgtcttcaggtaaaagcgctccgcggcgttcagcatgttccagccgcgttccagcgcggcgggcagcccggcagggcgcagcaattcctccgccacatcctgcgcgtagcggatcaacgcatccaccatggccaccgcgcggacgccgggcgcttccgcctcacgccgcatctccacgccgtcaatgacgtcacagcccgtcagcacgcgcatggccgccgtataagccgccatctggaaatccaccggctggtacaggccgccgctttcctcccccgccaggcggctgttctgcccgttcatgcgctccacctgggcgcgcacttcttcctgcagctcatattccagctcatcccgccaggcccgatgttccccggcggcgcgccgcagcgtcagcagcaccgtccccgtcacgttcgccccggtgcgcagggcgcagtccgtctccgtcaccacgtaccaggaggcggtcacccgcagccccgccgcccagatgatccaggccagccccccccacagcgcgccgctcttgtgcgtgaacatcagcgtgatggaaccgccggaactcatgttttccgacagccggcggaacgcccggaccatccccttccggaacccttctcccgttcccttcaccgccagcgcgcggcgggaatcccagacccagccccggaattcctccggcgggttccgccgcatccacgcgatgaagaattcataatttcctcataattcacggcatccccgtagggtggatccgtgacgcagaaatcatatccctcctcccactgttccgcggggaggttgagcacctccgccgccaccccctccggcagcggacaggggctcattctcccctccaccacatttcccagatacgcgcttccccggcagccgtaattgttctgcgtgttcagcgcctggttgtaaaaaatattttgaacagtatctcttcctttattccaaacgcttaaacgggcattccagttcaacgcgttcatcacgaagggagccgtctccgccgtcatatgccgccgcaggatggcccccgcaagcaactggcgcggattaaacaaatgccgccagtgcgtccagccgcgttcacgcatcggttgatttgtattatatccagcctcaatcttcatgtccggcagcaggcctgccgcctcccagtccgccagatgggcgcggacgtactccgtcacccggcgttcccgttccagatccgcctccgtcacggcccggaattgggattccgcccgtccggcttcctccgtctcccggatccactgcacgcagtagagccgctcctgcaggatgtcctccgggcgggggacgatgtcctccttttcccacgggcgcaggcggttgcggttgttcccctgttcatccctgtaatccccgcggatggtgctcatccgggtgcggtacgcggtaattccgtccggggaatgaaccagcgttcccttctccgccctgggcagggtgccctgcgcctccgcccgtttcttctcctccggccaccgggccgcgtccacatactcaatggaaatgtcataccgcttgcggacggggtccggaaccagccgcgccaccacccggtgcccctcgctgatcaccagcgtgggcagcacgggcaccatccagccggactgggggcagcgcacctccaggcaatacaggtaagcccggccgcgccagccgcggccgtcccgctccacgcccagggcgtccatctcccgtgccagcgcgcgcgccagctcacggcgcgccttctcctgccgcacggcgtccgccgcggagcagcccgccacatgaaaggcgccccagctcagcaggcaggccacggggttcaggtccgccgcgcgcgcgtcacagcccagccgcgccgcctcaaaggggatctgcccgctgccgctgaagggatccgccatgcgggggcggcggccatagcgcgccacgcccagctgctccaccagctccgggaaggagcgtgcctccgtccccaggcgggcgttcacctcatcccagacgccctcccaaaacccctcccccatttcctccggccgtttggcttcccgtaccagatccgcgtagctgagttccccgcgccggtaacgctccgccatttccgccgccaaaggcgcgcgggaacggggcagcgcggcccgcaggcgcgcctgcagcgcctgcggatccatccccatcaggcgctcaaacaggcgcaggtcccccacatcgtcccccgtggcgggcagcagcgtccccagcacgcatgccttgttcagaatgagcggcttgcgccccttccagtaacttcccaaaggcgtcaatgtctgcccacttccggactgtctttctttaaacacttccgcggacaagcgctgcacgggaaaaatcacctccatcagggagggggcatgctgtaaactgaagggagcgagcataaggatgaattcaggttcaggtgataaagatacaaacaattaagattcaagcttcaaaaaaatctgcgcgccttcttccccgccaagcccggtgcctccctcccgccgcctgaggcgcgcggagggagcggcctctcccatcatcagcgccagcgccctgcgccagccgcgctgacagtcgtccgccaagggcgcgaaacgagccgttctgccgaacagccacagccgctcctccggacggaacccctgccatgcgttggccatgcgcagcgcctccgcgccggaggcggcgtgttccagcgcccaacacaacacgcacagttcccggcccagcatgcgctccagccacacgccgcccgtacgccacctgcctggcgcctgcttcccggcctgcaggcgctcattgaactcacgcatcaccagctcgctgacggcggaccagcaggaacgcttcacccgcgccctcagcagggcgccctccgggcggctgccgtcaccggcaaagcccatgtcctcatacagggcaaccgccgcgcgggaagcctggggaatttccaaccggaaacggtgagcgccgcatgccgccggcgcgccaaagtcaatccattcaggcatcctgtctcaattcttcaggttgataagcaatggcggcatttttcagaaagcgttccagctcccgggcagcaggagccagacaggtcttgaatctcaattccatgccggcggaatccggaagaagggttttaccgccgtctccaggcgcgaggatggcggccgccaggctcttcaggcggcccgccggtatctccagcctccccagcttcaactggacgctctgctccccggacccgaagagcagctgcgcctcccggaaggtgacgccgcactcctccgccacgtccagcgccttcgccgcgctgacgccggggcttttataccccccggcggcatccaggcgcgccggagcgtccgggctcaaaacggccatgggatcgctgaccgcccccccttccgttccgccggcagcgtaaaactttctctggtttccagcccctcatgctccgcgaaggcctcaatccggacctccccggcgcctacctccagcggaccttcataaaggaggccgtctctgggattgctgccgtccagcgtatagcggatgggaatatccgggcgcgcgggagccagcagcagttccgccagccccgttcccggcctgcggttgacgcgcaggcgcaattcattccgccagcattgggggtcccccgtctcaaatttgcccgtggggtctttaaccaggaattccacccgcagggcgcgggtttccagcctgtcggacgtcaggcaggggctctcctccgtcacggcgccgtcttcctcgtaatggatttccggacaggggcctccgtccacgggatccaccgccagacgaaccagcccgctgtcatccggaccgtattcccgcgtccaccgcagggaagcgcggcggggacgcggctcgcgggtgatggagccgttgcccaggtcttcccagcgttctcgccggaaggcctgccgtttcaactcatccagcccctgagggccggcggggagcagcggcatttccgtcaccgttttgaggcgggaacgcaattccgtaacggcaattacgggagagtccggattgaacaggcaggcttccgcccgggaacagagcatgtccgcatgggcttccacatccgcgtacagcctgatggggggagcctccaacgcctttctgacgcggatttccccgttgtctttcccggaggtatccagttttttcaccgtgaaacgggggccatggaaataatgaagggagtcaaacgtggccaggacggcggcgttccagctgtgttcgtcattgttcaggcgttcctgcagttccgcgtactggggatgcccgttccccatagtctgggcggcgcggcgggcggcgtacacgcggcgggcggcttcatccagattccccatgccgcgggagccgtagaggagcagcaggttgttcttttccgggaaatcccccagggcacgcatgcaagcctccggcgtgggcgcgtcccccggcatggcgatgtacagcacgcgctcgcgcgccagggcggcgcgcaccctgtccggagcctcaaaacagaggacggaggcgtaagccagcttttccgccggcgcgaaagtttccagaagccgttcgcgaagcagttcccggatgcgggcggccggagcgttccgcgcgtaactggccagtttgctggtcaggttctcattgcggtcaaaataaagccgcccgtcttcctcatgcaggtaccacgcgcggccgcgcagctcctcaagagcttcccggaacggggctaccgccgcgccgggcgccgtcacgtaacggaacagttcccggggaaccaggccgcgcaccgtttccgccccggcgttttccgccaggctgctcatcatcagcatcatggccgcccgggtggcgcaggcatggccgttcctgcggtccagctcctgcgcgaaggcgtccccctgctcattccagatgtcgcgcgccagggcgccgtccaatctggcaatatcccggaacttgtcccggacatccgccagggaggggtcaaagtgctgggcgcccgccaggcacgcgtccccggaactgccctgccagatggatttgagcaggcgggaggccagctccagcaggccccgcgtttgctggaagccctcattatccttgaacagcgccgcgattttggaaaaactgggatggaagggatacgtctgcctgatggaatccgcgtcctgcagggcggcggcatccagcacgccggctttcaccccttcttccagactgcggcggaagtcttccgccactccggcaatgacttcctccggaggcagggaccggaacaggcgcctgcgcagaattccgtaaatctcattcccctccagctccacgggcgtgacggaatccagcatgcgcctctccccgtcattaacggcatcccgcagggcatggttcatgaaacgggaaccgcgggcatgcgccccttccagcgtggagacgatcatgaacgcctgccccgtttcccgcgccgccaccagcatgttggtgtacgcgttggaaatgatgtccgccacggtgccgttcccggagggctgcgtggcgtaatattcaaagtacggcggcatttcatccagcatcaccagcagggggcctcccgcccggcggaacagatttttccaggcgccggagtccggagcttccagcgtcgtaaaagcattcggaaggcccagctgccgcgcgatttctccccagaaaaagcccggcggccggtttctcccgttgaacgccgccacccgggcggcgccaaagtcattgatatgcggcacgcccggcatcacctcccgcctcaactccggatccgccgccagaagagccgcgcatttcatcaaatgcgtcttgccgccccccagcgcctgcttcagaactaccccggcgcaggaggattggcccgccagacgggcaaccgccttgcgtaccagctcttccagcccgcgcgtcacgtacgttccagcaaaaaaagctctcccgtccgtcccgcgtatgtcttcttccaaattctcaatctgttcccctactctgacctccaaagcgccatccctcaatacacacagctccttgatgctcttcaccgtttgaaactagctgattccctatccgtcaatcgagcgactttccaaataattatagatgttcatgaatctgaaattctgacatctagcgtctcaacaacatatttcatctctgatttttacgcccaaaatcgccaagaggcatttattaaatgcccagaaaggagacttctttctcttacacgaagtgggacgacaaattcatcaaaacataaaacattcattatcaatataataataagacaacattttaggattgacgacggatagggaatccgttgcttatgctacatccatgaacaagatgcacttgacggaagaagaaacgcttttgatacaatggataagaaaaacgcgcctttcccccgcggagttgatgctgacaacccaaatgctccgcagagcggcaagaggaaccaggggaaggcaacaatgcgtggaactgggaattcaggcctggagggagatgaaaagaacggtttcttttaagacatgcgtggaggaatctctgaaggccagagcgcaccggcgaccgcgcaccttgggagaaatacgttccgtgagcgcgcgcatgatgagggaatggcctgccttgcaggggaaaatgatgagaagcctgcgtacggaagactgccgggccatcctgtcacgcttcccgacaccgggcggaatgcggaaagccagagtgattctgcacggcatctgcgcgtttgcctgccgccggggctgggcaggaggaaaccccgtggagggcacgttcgccccggccgtcattgaaaaaaaaatccccgtcctgatgccggaagaatgcggccgactgatcagaaccgcacaaaaggaatatgacggcgcgtgcctgccggcggccgtgctcatgctgtacgcgggagtgcgcccacaggaggtcagaagattaaggttccggcatctccgcctggagaatggggaactgatcattccgtcaacgcacagcaaaacgggaggctcccggctggtaaccctgcagccggtggccctgcgcttcctgcgctcattccggcgcgttccgccggataccttcatttgcccgaaaggctgggaaaggaaatggagagaggtgcgcgtacgggcgggctggaacaaaaaccacccttgggcgcaggacatattgcgccataccttcgccagctatcacgctgcggcctttcgggattataccgctcttcaatgggaaatgggccaccgggacggaagacagctgcgaacgcggtatatgaacatggattccatcggacgaaaacacgcggctctcttctggaaaggcagggaacgccagtatgaacgcaggagcctcaacatcaaccagaacggcttttttggctgagctgaaattttttcccgccggtttttccatttcccgtcaataaccggaaccggcgaaacggacgcattctccctgctccttattcaacaacttttaaacggtccggaaagcgcggaagcatgattttaatcattcaaaaaacttttgaacggaattgaagtcagcgcggtctcacttgctgcaaacggttcgccggaccgttccagtcgggaagcttcaaccggagtttcaatcatgaaaataacctcgttcatcatcaggacactatgcgcgggcaccgtcggttccctcgcctgccaggccgccatgcaggcttacgcggatgacgttccctccaccttcgtggaaggaaattattccccggaagtagcccgctacgtgcagagcatcgcaggcgtggcgctggcctcgggcattcatgattacgacgaaaacgccaccagcagttatcaggttctggctcaggtccttaatagcggcaatgtaacggaattgccggaagatctgaaacgggccattggaatgctgactggctacgtccccgacccgaatgaaatcatccagcctatcatgtccagaaaacagattgagaggatgagaaagatggcggaccgcatcaagaacctgatggaggaaaaatacggagtggacctggaagactgcacgaacatcatgaagcgcactctggccccgtccatcccggacatcctccgctcctgcggcatggaaggcacccagctgcctgccaccaccgctttccgccccaggctgggcaaggctctgaatgaagcctatgccaggcttgcggcgccaaaacttcccgccgccggcatggcgcaataaccggaccatctacggatgatcgggaagataatcccgattccacggcacgcggccccctgccagggtcccctgaatagaagccgcaggaaacggaatgatcttccccttctccgggaacggaaacggcagccaagcgccggcggcaacaaacaacaccctccggatgtcctccgatgcagggccgatccttcggaacgcggagcggcgatacgcccgctcccctgctttattcccaagcaacggcatgcaacatcggcacaaccggatgatgcccttacaggccccgtccttcccgcgctgcggcaggaccggggcttttttcatatccgggattttcaaaaggcggcggcataccctcctgattctcttcaggaatcagggatattccgtttttacagaggaatgcatttttttcatcatctgtgaaagaaagcttctcaagcctcagtatttatggcagactagggattcaaatccttcatacaattaccatccatggataattcatcatcacgccgtcgtttccttcagaccctgggcctggccactggcgcccttgctgccggttcctttgccaacgcccaggaagtagcccccctggctcccaggaaaatcaccattccggacccgaataacatcggccccatgaccacgtggcccccgcgcaagcccggcgccatctacatgggcggcttcagggctcccaagctggacaaggtgcgtgtggcctttgtcggcgtgggtgaacgcggttccatgcacgtgggccagatggccgttatagaaggtgcggaaattgtcggcatttgcgacctgtatgaagactgggccaagcgcagtgcggacgtcgtggaaaagaagacgggcaagcgcccccccattttcacgaaaggaccggaagactacaagcgcatgatgaaggaagtcaagccggacgccgtcatcgtctgccccagctgggaatggcactgccgtgttacctgcgacgtgatgaagatgggcgcccacgcctttgtggaagtgcctatggccgtctccatcaaggaactctgggaaatcgtggatacctccgaagaaaccaggaagcactgcatgatgatggaaaacgtcaactacggacgtgaagaactcatgtacttgaacatggtgcgccagggcgtcattggcgatctgctgtacggagaagccgcctacatccatgaactgcgcggacagatgaagcaggtggaacgcggcaccggttcctggagaacctatcactacgccaagcgcaacggcaacgtgtatcccacgcacggcctcggccccattgcccagtacatgaatctggcccgcaaggacgactgcttcggcaggctcgtctccttctccagcccggccctgggccgcgccgcgtacgccaggaaaaatttcccggcggaccacaagtggaacaagctggactttgcctgcggcgatatgaatacttccatcatcaagaccaccatgggccgcaccgtcctggtggaatgggatgaaacaagtccgcgcccctactcccgcctgaaccttatccagggcaccctgggcaccctggccggcttcccgacccgcgtagccggcgaaaaactgggcaacggaaattatcatgaatggattgaaggcaaagaaaaactggcccccatttttgaaaagtacgaccacccgctctggaagagaatcgggccgctggccctgaagatgggcggtcacggcggcatggacttcgtgatgctcttccgcatcatcgaatgcctccgcaatggcgaaccgatggaccagaacgtttatgaaggagccttctggtcctccgtctccgagctttccgaatactccgtggcccagggcggcatgccccaggtattcccggacttcacccgcggagactggaaaacgactgctccgctgggcatcgtccagtaacaaccggcgactttccccggcccggagcttttccgcctccacggcgggcttccgggccggggccaatgccctctttgcaaaaaaacaggcccagcttgcaagcggcctgttttttattgcgtcaacgacatcctattccagaagttgaaagacgctgcacgcgtttcacttgtccggaaagcccccgtatggcgccaaaaagcggaattccgtgaaattttctttctccgctgagctgtatataaacgtgggaaacatcccgcagcgaaccgccgttccctttacatcgcacacgcctccatgctttcctactgcaccaatattcatcccgccgaatcctgggcggaaaccagggaagcccttttcacctgcgttccccgcatcaggcaggaacttgcggcgatggactcccctctgaagaatctccccctgggcatcggcctgcgcctgtccgccagggcggcggcagaacttctggaaacgccgcacgccgcggaaaccctgaaatcatggctggaagaccagggcgcgcgcgtggaaacccttaacgggttcccttacggaaatttccacgggcagcgcgtgaaagaacgcgttttccagccggactggactacaccggaacgttttgaatacacctgcaacctgtttcgcattctggcactcattggagacgaacaggctgacaggctgaccgtcagcacgctccctgcctcgcacagctggtttcatgcggatgaagaacgcatcttttcccggctggacgccatgagcggattcctggatgtgctgggcaggcagaccggccgcctgatgcagctggggctggaaccggaacccttcggccattttcacgatacggatggagccatccgttttttcaacggccttcgcaaccgttcccgccgtcccgaacttatcgaacgccacctggggctgacatacgatacctgccatttcgccattctccgggaagaaccggaattcaccctctccgcctgggaggaaaacaacatcgccctctgcaaagtgcaattctccaacgccctggaatgccgcatatgcggggaggaagacctggaacgcctccggcagtttgacgacggcgtttatttccatcagaccagcatcctccaccgggaaggcgtcatgcttttcccggatctgcccaatgccctggcctatggacgggactatgcggaggaaatgcgggattcccaatggcgcatccattaccacattcccctgtacgcttcaccggaaacacccttgaaaggtacggaagaattcatcctgaaaacacgcaatttcctccgatcccgcaaaggcccgcagccgcatctggaagtggaaacctatacctggagcgtcctgccggaccacatgaaaatccccctggcagcccagattgcccgtgaactgcattatattgaaaccctgtaaagccatgatgccccgcatgcatccctccgccgtcctgtcttccggattcctgctgctgtccaccggtctttcctcctgcacatttcttcccatgttttcctccggggggcaggaaacgccgcggaccctgggcgcacgcatggaaaaacacacggaagtcctgcaaaaagacatcggggcaagaaacgccagccagcccaaatccatggaagccgccgccaaatacatcgccgggaatttctcggacatggggtacgccgtcaccatgcagcccgtatccggaggaaacgtgaaaaaaggagcggccatttacaacatcctggtttacaagcccggcctgtattccaacaatcaaagcatcgtcgtgggagccaattatgattccagcggacggcgcaacaacggcagcggaacggctctgctgctggagacggcgcgaggcctgaaggacattcccaccaatcacaatatctattttgtcgcgtacgcgaatggagcggaacccgcggggaaatccatctcatccggagcctgcgtgcatgccggctccctgagcggcagcatcggggcaaccaatatcctgggcatgatcaatctggaaccccagaagctggatgccggcggggaacgaaaacagacggggccggaatccacccgggaagacgttctgttcatgaccacctcccacggcaggaaattcgcaggccagtgcgccgcccccttcgccaaatcctgggaacaggcgcccactaccttacaacgggaaccctccgctctcacaggcaacgaccgccattacgcggccttgggcattcccacggtctcctgccggtgcaggtatcccgttacggacgcccgtacagaagaatatgtgcaggcactgacggatatgatccaccaggtagcggacaacgacgcgcccgaaccggcaaaaaacgccggccagggcgagaaagcatcctgacgtttccctctctccccgttaccgggacagctttctccttccgtggccgccgcccagcatcagcacaggcatgaaggaaagggccaccagcgcaataaccataggcatccaattgtcggaatacctctgcatcaggaatgaagtcagggaagggccggccagcgtgcccagggaataactcaacagcagaagctggttcatggtcaccagttcatcccgggaagcttcctcgcatccccaggccatggcaacagggtacagggaaaatccggccagccccagagcaatcagggagggagccatcagcccccccttcagcatcagcccggcacaggccgccgccaccagcagggactggcatttcatgacgaaagcgcggccgtacctgtccgccagccgccccatgggccactgccccagaatggcagcggcaatcagcagggccatccagtatcccacggaagagtggtccattccctggtgcttcaggaacaggggcatcaggcaataaatagtacccaataccacgccggaaatcacacatcccacaacacccagaaagacgctgcggcgtctcagcagtgtccgaatctctatatgggaggaggatgaaacctgtccattgcccggctccagacgcgcgaacatcagcggaaccatgcccgccactgataaaatgcagacttccgtcacaatcaggggcatatcgctggggaaccagcccagaagcaactgccccagcaccgtacccagataataaaccaccatgtaggaagccagcagaatgccgcgggtttgcagcgttccggccctcagcagggcgctttccaccaccacccagaccagggcgcagctgatccctgccagcagccggaggccgctccaggccggcacgccgggaaacacaggcagcagaacggtggacactgcgcataaaaggcacgcatattggtaacttcctttgaacccggcccggcgaatcacgccgccagccagcagcgttccggccaggttcccgagaaaaaagaaagcccccaccagccctgcctcccaggtggcggcatcaaattgctccatccacaggggaacaaccgtattcaacacggcaaacgccactgtctggaaaagaagccccgccagcagcagggcaataggccaggtaaatgtacgcatcacgataaagcggggactatagcaccaaagccgcatcagtcaaccgcctcttccgtcggaaagaaaaacaaaaaaagcgccccatcaacaaaagacacaatacattgattgttaaattattaataaacaattcaaaatataggggactgtcatattccccggcgcagggaagcgggcagtatcttcatctgctcccgatatttggccaccgtcctgcgggcgatgttcacccctttttcccgcagcgcggccgccagcccggcgtcactgaggggtttggaagaatcttcctccgcaatcagccgccgcatcagctcctggacggcgccggcagccacggctccggaagccgccccgtccggggaaacgccgccttcagacggaactcccgcactgaaaaaggatctcaattctttcatcccccacctgcacaacaggtacttgtcccggcacgcccgggaaaccgtggaaacatgaacccccatctcctccgccacttcttccatgcccatggccttcaggcgggacgggccggacctgaaaaaatcctcctgtctccgcacaatgacacgggccaggcgcaaaacggtctcctgcctcatatccaaagcccgcaacagctcctgtccctcacggaacgccctgcggagatattgcctcagctcccggcttccggaaccctcagccattaactccatataccgttcattcatggacaggcgcggaagatactcggaagtgaggacaacctccagcacgccggaaggcccctcctccacaatgacgtcaggcagcagatgagggtttccgccgggggcgtaggccccccctggatcaggagtcaggctcctaatcacctccagagcctccgccacggctcccggttccacgtccagcaggcgtgcggcttcctcatacttgtgcgccgccagttcccgccagcagcgcttgaccaggcggaaagcaagcgaacgcttcaaaccgcgctgttcaagctggatcagcagggaatcccttaaatccgccgcccccactccgggcgggtccatttccctcagcgcagccagagcttcctccatgtcccgcatgctgaaacacccctgctcttccagctcctgcggagactccgtcagaaacccgcgttcgtccaaagcgtcaatcagcaggaacagggcgtcccgggcgcggcccgtcaatgcggaatgctgcgcctgatccatcaaatgggttttcagggattccggagccacgacggattcatacatgaaatcacggcgggcggccgcgtccccagacaggcggccttccgccgtaaactcgttccacccgtcctcccgctcattccaggcatccccgtccggaccgtcttccagcgcttccggggaagcgtccggcaactcctcaagcatgggattggtttccagcgcctggcggataatctgccttaattccaaagcggaagcctgaagaatctgcatccccgtctgcatggactgggaaacggccatctggcgcgtcattccatgctgcagggatacctcactcataccgcccacaagctacaccaccccccggaatctggcaagggggaacaccctgcagcaaaagctgcccgcacaccgcagcagcaaaaaaggccaccactttcatgtggcgtttttggaaaacgttcatacaataaatgccaatgaagattttgcacatacttgctttctccctgctggcctcccttctctcaacggctgcgccgtcccctctgactccgctgccacgggaacagccccaatggtggaggaagcaatatgaacagcaggtggaacaaataaaaaacaacccctgcggcgtccttttcctgggagattccattacggactactggaaaagggaaggaaaaccaatatgggaaaaggcgttctccccctatcatccctgcaatttcggcatttccggggaccaaaccaccaacctgatttaccgcatcacggattccggcatcccggcccagacggaccccaaactctgcatcgtcatgatcggcaccaacaataccggtcatttcaaaggaggggaagccccggaaaaaacggccatgggaattctgggtgccgttgaacacctgctggtcaggttcccggacacccacgtcctcctgctgggcattttcccgcgcggcacaggcccccaggacaagctgcgccagcacaacgaccgcatcaacgccattctggcccagtgcaagctgccccgcaccacttacgccaacatcaacaggcgctttctggactcctccggcaaactgctccccggcatcagcagggacaacctgcactttacggaaaaaggctacgccatctgggcagacgccgtgctgccctatatcaaaaaatactgcaaatagctttctttcccatcctcgacgcatgactgtcggaatgcccccttccgccagtcatgcgtgcggttcgggaacatatttgtcaatcaatgatgaagcttacgcagcaacaactgtccagccttcattttgaaactgcggtcatggagcctgaaaagcaccgctcatgtccatcaattcatttttcccggcggctccgccctgaatgcttatgagtaacgtccggactttggggagcccgctttaataaacggttaagatacaaaagcaatacggagcatggaaagtatttaccgccaagcccgcaaaaagctgcatggatgccagggcccgcgtctgaaaattttgcgcagaaccgaagttgcagttgatttggaataaatatattatgatgagacaatatatcatagacgcctttactgacaaagtttttcatggaaatcccgcggcgatttgcattttagaacaatggccgtccggggaattgatgttaaatatggccgttgaaaacaatctttcagaaacggcctttgctgtcaaaaagggggggagctatcatctgcggtggtttacccccggtggagagattgacttatgcggtcatgcgacattagcctgtgcctatgttattttgaacttctatgaaaaagaagcggcaaaagttgtttttcaaactttaagcggtgatttggtggtagaacggcatggtgatctttatgaaatggatttccccgcctatgaattaaaaccagttcccgtaacggagcaaatgatcgacgctatcggcgctacccccagagaagcgtatatggggcgtgaccttttatgcgtgtttgacgatataaaaataatcgaacatctcaatccggatctatcaaaagttcatgccctgaacggtcttttgctccatgtaaccgcaaaaggtacggaaactgactgcgtttcccgtacctttgcccccaaatgcggagtgccggaggatgccgtttgtggttccggtcattgtcacattataccttactgggcgaacagattgggaaaagacgacatcatagcttatcaggcttccaaacgcggtgggacactttattgccgcatggatggagcacgggtaaaattagcaggaaaagcagccttatattccattgccgaaacacaatcaagatgaagcgtcaataggttaagaacatatgccgggcgacggaaaaaacgtcgcgcgacagaaattatacatgcccaatgacacaaacggcggttttgaataatcaaggacgccgttcttctattccctaaaaaataatgcaactatgctttcaaacatggcggtcaacgggaataactgccatgaagcacaaagcatgccgacaaattccgacgaggtctatatcaaaaaatacatccgccgcagaatatcatatctccaaacgtgaatcataccatgtagcaaaagtgaatattttttcaaacttccatccggtatgcttgtgtctttacaggtgtgttttttatttttctttatgggaaatacaacaaaaaaaatcatgaaacaaccaaatcccccggccggaagcaggaatccagccgacccgcctgtgccgcatttggaatcaggaaaaagcgcaaggaacaaaaaaattgctttttcccggggatatcctagagtgcctctccgcaatgagcatgccgcttgccgacttgatcttcctggcttttgccctctccgtggacgctttcgtcgtggcgttctcctacggcctgctcattaagcaaaagcgtttgagcaacggaatcaagctctccctgtccaccggggccggtcaattcctgatgcccgtgctgggttttctgcttacaggctccgtgcaccggtatattgcggcctgggaccactggctgggcttcgccgtgttcaccttcctcggtgtcaacgtcctccgcgaaggctggaatcaccgcaacgaagaagaggatatgccccacgtcaccagcctgacgcttcctacccttatggctgtgggaatcgccaccagcatcgacgcgctggtagcgggcgtcagcatttacctttcatccgcccagtgtggaaccgaccctaccctccatgcggtgcttctcccagccgccgccatcggcttcaccaccttcctgtgcacggcggccggctttttcctgaccagacggctgcaccgctttccgacctttcatctggaagcgggagccgggctcatcctcatcggcctaggcgtcaaaatgctctgtgaccatttgtgctgaaatatgccgcgaaggatgataaaaacgtccttccggcatcgtaataagtcgaaaaacgcactggttccctcccccctctttctgctattatcaagtaatcccttccacatgaatatttcacatcttcttctctgcacttccctgctcgcggctcccgtctgcgcggcacagggcctgacggaaactgaaacggaaacgccggcctcctccagccgcctgccggcgcccctggcacaaaaaattgcctccggagactttgagggcctgcagacggaactgcgctccaccctcctgaaggctggagaacaaacgaaatccgaacagaaactgctccagaacaagcagtaccgccatttgctggacattcacgaactcctgcgcgtcacgggaccggacaaggtgaaagccgttttctccaaaagcgcgcaagatgcagctttcatcaaaacctttctacaggacccggcgtggatggagctttaccttggagcaggcctgattccggaaaattcaccggaaggccttcaaatcctctccgacatctggaaagcggacggcaagagcccggatttccggagttaccaatccctggccaccgggctggcctctgtcttttccaccggccccatggcgggaaggctcaaaaccaactccgccaacagcaatccggtgcgccgctaccggattttcaaaaaactgcatcaggaaaacaggctgcatccgggattcatcaaactgcgcccatgggaaatgcgcttcgtcgtgggaagtccctgggacgataaatcctatgaatggagcaatgaacacgtcaacctcccctggcggcggtacacggccgcctgctgggccgcaccctatacgggccacaatttctttggcgataccattcaggggccccttttctacgtgccgtggagggatcttaacacgaccgcggaaaacacgcagatcatcggcggcgtttgcggcggcctctcctatttcggcaccatggcggcccaggcccacggcatccccgcttatccggtaggacaaccgggccactgcgcgtacgcggtgcgcgtgaagcggggggaatggaaaggcggcttcggcggaccagacggaggcatgcacaaccatatcttcggatcccaggctcctacttcctacctgctgatggaaaatgtctttgctgacaacgataaggcggaccaggcctacctgtgggccgcccaggcccggctggacgaggcttccggcaacaaggacaaggccatccaggcatgggaggaagcgctcagacaaacaccgctgcacccgttcttccgcacggaacttcaacgcctgctgatggaaaaggaaggcatgcagcctgtcgactggtacgtttacgccaaggacgccctttcccactatcagggcaacggctttgccgcattcgacatcctcaaggacgtgcagaataaattcctgatggatattccgcccgcggaccggattgcctggttccgggacctgcatgaagccatcgccaccactcccacatcatgggcggtgaaattccagcccgtgctggactcccaatccgccttcctggcaaatccgcaggaaaaagcggcctatctggaaacagtcctctccacccacctgaaaacgggggacggcaccaactttggccaggcgttggaatggggcgtgaaaaactttgtggaaaacggacaggcggacgtgttctccaacgcattcgccaaggtagcccagcaaacgggaaaaaccgggacctccgggaaagcccccgaccccaaaaagctgaaggaagcctacggcaaagctatctatgccacggaaacggcccgctccattccggccttccaggccttgagcaaagcggcggcctctttctccggcgccaatgcgacgaacaatacggtcaaggcgtccattccgcagggctggaaactggtgcccgcagacggcatggtccggtgctccaccacgagccagtgggacagcccctgggaccatatcaacctgctgcgtccctgcggcggagcccagcatacggataaggaagccaacccgaacgtcattgtagaactgaaaaacggagtgaacctggccgggctggtagtcaccaagcgcgacggcaatgaaaaccggatgaagaaaatggaggtctccacgtccacggacggagccacctggttccccctggccgccacggaaaacatgcccaaggaatgggtcatcaccgcaccggaaggcaccaaagccaagtggatcaaggtggaagccaaaaacgcacagccggaattcatgcacctgcgccatatcctcgtttacgaaaaataaattctccattaacgccatgcttcatcacatcaatcccgtttccggcctgctggccgcagccctcttcctgtccgcccctgttcaggcggccctccccgcttatagcgccgtgaaagacgaggcgaaaaccgtcaataaatacatgatcgtcgtatgggccggcacggactggtccccaaaatcacgtgaaatcacccgcgctgtggaacacctggccaagaactccccggaacccgtgctctggtgtatccaggacgagcgtgaggaaatgacggaagaagagcagaaactgcccaagcccccgggagaaatctggaacatccccgccattcaggtggtctcccccaccggaaacatggtattcctgtcggaaggcgtctccagggaaacattgccagccgtcatgaagcaggcaatggaagccgtaaaacagcaaaacaaggccaatgccctgtgggaaaaagccgccgcttcatccggaacggccgcggcccttctttacggagaagggcttcagcagcttcctccttatgcggcctctgccagaaaggatattctggaaaaaatcaagaaggcggatccggaagacatcaagggagtgcacttcaaatacacgttcaggcatctgccctacatcgaaaaagtgcagagaatggtgaatgattccgccaaagacggcggtccaaaggattacaaaaccgcccatgcctatgtaaacaaacagctcaaaacccccggcctgactccccttcaaaaacaacaggtcatggcggccaggttctggctctaccgcaatgaggggaaaaaggaccaggcgctgaagaccctgacggacatcgccaggatatcccctaaaaccctcatgggaataggcgcccagaactactaccgctacctgacggaacccgtcaccctgaaaagtcctcacttcacaggctacgacctgcgcccggaactgacgcctacccgcgtcaacgtcagcagcatgcttgacggccccggaaactacaagattaccttcaagatgaacagcggcggctgcaatatccgcaacccccgcttcatgaagggcaaccgcgtagtcagcgaactgcccaaggaccggcaggacaaaaacgggcgcgaattcaccctgcgcctctccggttccgaaaagccggacttggttttcgactgccagggccagggatggttcgatgcggactgcgacatcatcgtgaccaaggaatcctgactcctgccggcaaacgaacaaaaccgccattcacaaccttcacgaaggcaggacattcccaaggaatttcctgccttttttccgatgggagaagaatttccagccagcgcccaagcggaagcatccctctctccctgcttcttgccggccaaagccgaacaacattcccggcagcttcaaaggagcaatcagggaaaccttcttctcattcccgcgttttcaaggaagaattaccccttcttcccgccttccccggcgttctccgccagttgacggcggtattccatgcgttccctgatcctcagttccatcccgtttccggtgggggtgtaatacacgcggccttccgggaggtaggcctggggtacgtaatgttccggatagtcgtgggaataaaggtattccagcctggcggcatccgcgcctccggcggcagccagcttcttgcgcgttggcgtccgcaggtgttccggaactgccagcgttttcccattgcgcacgtcatccatggcggcattgatgcccacgtaggcggaattgctcttgggggccgtcgccaggtaaaccgcagcatgcgccagaggaatgcgtgcctccggcatgccgaccatttccgccgcgcgcgccgcgtccaaagctacgcgcagggcgttggaatccgccagccctacatcctccgacgcggcgatgaccagccttcttcctataaagcggatatcctccccggcttccagcatcatccccagccaatacagggcggcgtccgggtcagagccgcgcatggatttgatgaaagcggaaatcgtatcgtaatgggaatcccccaggcgatcgtacctgatagccttgcgctggatggattcctccgctacggagatgtccacatgaatgacgccgtctttccccgcaggagtggacagaacagccacttccagagccgtgagcgccttcctggcgtctccgtccgccttggcggccaaatggttcagggcttccgcctccatatccacgcgggatgcgcccagcccgcgcacctcatccgccagggcgcgcttcagcagggcggccagctcctcctccggcacaggctccagcggaaaaacctgggaacgggacaggaggggggagttaatcgcaaaataggggttttccgtggtcgctccgataaacctgaccgtacccttttccagatggggaagcagaacatcctgttgagccttgttgaaccggtgcagctcatccacgaaaagaacggttttccgcccgtgcatgctcatcctcatctgcgcctgggctattttttcccggatgtccgctacattggattccacgccgttgagcatcatgaaatgggcattcgtcgtccgggcgatgacggcggccagagtagtctttccgcacccgggaggcccgtagaaaatcagggacgtaaaccggtccgtctcaattgcccgtctcagcagcttacccggagccagcagatgcttctgcccggccacttcatccagggtgcgcgggcgcatgcgcgcggccagcggcatggcggaagtgtccgccccgggctcaaagccttcccgcgcttccgcttcctgtaaactgaacaaatccatcggaaacactttacccggttgaaaggccggagaaaaggccaatccccggaatcctgaaagtttggcggaagcgacaccgttcccccccctcaggacggaaaatgcacctttatccaaacatggaccagcaggacagcatgaaaaccatgctgacaggagccaaaatgctgaacagcagccccgcaacagccaatcccctgcggttcacctcccagtaatgaagggaggcgatcagcatccagatgggaatcacaaccatgtggacgagacccaggagcccccagcccgccagcaccagcaaaaagagccatgactgcgagccgtccgcattattgctcggcatgacaaggccaaagaagcggtacacaagcaaaaagaagacgaatatggcaaaaggtatccatccccagcgggcttcctccttccggcgggccatggccaattcaaaacagggatctttaaacgcaggcaattgcttggcagaagaatctctgaagaaatacatatcgcccgaagtctctattattacgtctttcttccgtcaataacattcaatgccagcccggattttttccgcagaaaatttttccctctaacaaatatgggatatcggcttccgtccattaccttattgtcaaagcaaaggtttttgaaaattcatgaaacgctcttgattataaataattttccccttttttcggatacttgctcttcgtcttttcccatgataaaaaagtctttttgcatcatccgaatttcaacacccgttcaatttgtcatacacagccccagtttcccataaaaaagactgcctccgctgcaggagcggaggcagtccgggggtaatataaaaccggaaattacagaaggttacctgcccagaatgcccttgaagtattccagcgtcgtcgccaagccttccggcaaagtatgcctgggctgccatccggcattgcggagcttgtccgcacaggcgcgggaatgcttgacgtctcccggacgttccggggcatgaagcaccttggaggaagacccggcagccttgatgatgttctgcgccagctcttcaatggtgatctggccgccgtaaccggcattgaacacgccggtgacttccgggtgttccgccacaaaggtgagggctcctacaatgtctttcacataaatgaaatcgcgcgtctgggagccgtccccatacacggtgatgtcttctcctttgacagctttttcaatgaaaatgggcacggccgcggcataggcgcccttggggtcctgccgggggccgaagacattgaagaagcgcacggctgccgtattgatttttccttccgcccggaacatgttgaggtagtattccccatccagcttggtaatggcatagggactcttgggttccgggtacatggtttccagtttgggcaccgtgggattgtctccataaatggcggcggaagacgccagcacgatttttttgactccggcggcggaagcttcctccagcacgttcagcaaaccgttgacgttgatgtcgatgcattcgctgatcttgctcatggattccggcacggagacgagcgcggccatgtggaaaatatagtccactccctgcaccgcctggcgcaccagctcccggtcgcagatggaaccttcgatgaacgtgtgcctgagcccttccaggttcctgagatagcccgtgcgcaggttgtccagcacacggatttcctccgccttatcctgatagtgttccacaatgtgggaaccgatgaatccggcgccgccggttacgagaatcttcatgtttttccgatgttggtagatattggttaatagcggtccacaatggccttcatttcatccatctgcgcctcaatggattctaccagggccatctgcgtgcggcagcggtccaggttgtgttccggacggtggattttaaaatacacgtcaccggacaggtagtccgtcaggaagcggatgccgcattccatcgtgagcaatttgccggagaacggcagcaggctcttttccagaggcgtcaggaaactcttggcggaactcaggtaaccctgaaccagagcttcaaacatgaacatgcgcatcgtgaccttggagacgtccttttcatcttccgcggcgggagacgtggccgtccggatcatgtcgccgaagtcgtaaatggcggaaccgggcatcgtggtatccaggtcaatcacgcaaatgccttctccggttacatcgtccagcatcacattgttcagcttggtatcattgtgcgtacagcgcaggggcaattccccggatttcaggtaatccaccaccagatggcagtccgactcacgggaaaggtaccagtctatttccttctgcacttccttcacgcgccccagggggtcggactggatggcctctttcagagccgccaggcgggaagtggtattgtggaaattgggaatggtttcaaacaggggctctccgggcaggtctgccgtaagcttctggaattcgccgaaggcgcgcgccgcttcctggcactgcctggtagtttcaatctggtcatacgtgcgtgcgcgttcaatgaacgggtacacgcgccagcagttgccgtccgaatccagggcgtacggcttgccgtccacggagggaaccagcgtgagagtgcggcggtaagcttccgggcactgttcctccttcaggcgcttcagggcgtggtccgtcacgcgctttacgttctccatcagagggatgggctgcttgaacacgttatggttcacgcgctggaggatgtagcggatgcgctgtcccgcctgatccacccagatgcagtaggtgtcattgatgtggccgctgccgtaggaataaccgtggacaaaatcgccgcggagatcgaacagggttgatacagccttgagatcgtgcatagggaaaaaggcttagttgagcttttcagggtatacgccctgctggataagtttgttgatgccttccacaaccatgggcttgtcccccggataggtcatgccgaaccaggaggaagaagtgggaagaacggcgcaatccgcccggtccgcatgaatcagggcgtccaccacggtgggaataaagcattcgctcttgggttcctggccgtgttctttcaggaagtcaatgaaatgatcctccgtcagttcaatgaaggagggggagaacagccagaaattcatggaaaccagttctgcaggatccaccggcaggcgttcgcccttcaggttgttgccgcgcactacgccgtcttcgtcagcctggattttcacgaattcctccacgccatccagaaggccgtccttaatggagcaaatgccgcggttcacgtccccgttgtcggagagggtgttcttcagcggatagccgatcatgccgtaatgggccttgccgggttcatccgtagtggaggtcaggaacttggcggcctgcacaaaagcgtccgcaccgtaaaagtcatccgcattcactacggcaaagggttccttcaccacgtggcgggcggcacgcagggcgtgggcggtgccccagggcttttcccggccttccggcacggagaagccttccggcaggtcgtccagggactggaaagcgtaatccacctcaatcttgccggcaaaacggctgccgaccttttccttgaaaatatcttcaaagtcacggcggataatgaataccacttttccgaaaccggcccggatggcatcataaacagagtagtcaagaactacttccccgttggggcccatcgggtcaagttgcttgagaccgccgtaacggctgcccatgccagctgctaaaacaagaagtgtaggcttcatcatacgcaggccattatgaccaagcctccccgtttggcaacaggaaaatgccggaaaaccggagaaatccgcccgttaaaaaacgtaagagcaccaaagccccagcactacttttttgaaatcgtcccgcccgtagccgcaataccaccccaggaaaggctccacccgcagaccgccggaaacggcccacagcgcccccgtgcgcaccatcagctctttcaagccgttcctccccagataatcgtgggcaaaacccagggaaaccgtattcaccatggcgacggattcgcacagcaggggctgccaggtaacgccccactgggaatatgcaccctcctgtccggaatcatacaggaaggaaccgcggaaagaccaggaaggggtgggattccatttaagggaaaggcccggctccgccccgttcttcaggggacaggaatcgtaccactgcccgttgacaaaaagcccggccgtgcattcgtccgccagataatactggacttccccgtgtaaagtggcctgactgaaatggcggccctgccagttgcggatggcgaaaagttccccgctcaccgcccaggaatcagacagggaggctccgccggaaatctggccctccgtggaatcagcccccatcttttccccccggtggacatagtatgaacggtagccgccaagcatctccccgcccatgcggatgggggaacggccgtccacctccgtcaggggcggcggcccgtcataccccaggacggcctgcacggcacagcacaggatgatggaaaacagcctcatgaaagacttttaacacaattcgctgcgccgctccaacgccaaaacggtgcatgcacattctccgggcttggcaaaacgggaatctgcccttaccctctcgcgcatggttcatttcaccctgttcgggatacctgtttacatccgccccagcttctgggtggtgctggccattttcggcggcgccctcagcatcagcagtgtggaagatctcatttatccggccctgttcgtcattgccggcttcgtcgccatcctgtcccatgaaatggggcacgcgctggtgggccgcaagctgggcggcggccagcagacgattgttctggaattcttcggcggcctgacaagcagccatggcatgcaactgacgcgcggagggcgggccctcatgattctggcaggccccatgatgaccctgctgctgggcatcatcagcctgtggctcacctggaacatcgtcgctcctgtcatgacctcttacaacctgaacttctgggatctggccatcagccccttcacagcagcgctcatctcccccaagctgtacattctctcctgcctcatcatgattggagaatggtggactatcctgaatctgctgcccatctaccccctggacggcggccagctgatcgcccagtacatccgctcccccaggaaagtattcatgaccggcttcatcacggccatcctcatcggactgctcagtttccagctcttccacggctactttatccccatcttcatggccctcttcgcctacagcaattaccgggaatacaaaaacgcccccttttaatattattccgagtttccttcgcgggccctgcccgttctattcaacaaaccatccaatatgtctcagcaaaccgcaatcacccctacccgcgcccaggatttccccgagtggtaccagcaagtcatcaaggccgccgacatggcggaaaattccgaggtccgcggctgcatggtcatcaagccatggggctacgccatttgggaactcattcaaaaggacctggaccagcgcttcaaggacaccggccatacgaacgcctatttccccctcctgattcctatctcctatctggaaaaggaagcggagcatgctgaaggcttcgccacggaatgcgccgtagtcacccaccacaggctggaagcgcaaaaggatgaagccaccggcaagacacgcatgattcccaccggggagcttacggaacccttcgtcatccggcccacctcggaaaccgtcatcggcgcggctttcgcccgctggacctccagttaccgggacctgcccctcaaagtcaaccagtggtgcaacgtgatgcgctgggaaatgaggccccgaatcttcctgcgcacggcggaattcctgtggcaggaagggcatacggcccatgaaacccgcgaggaagccattgaggaaaccctcaccatgcacaaggtttatgaagaattccagcgggacgtgctcgccatccccaccattccaggggaaaagacggaggcggaacgcttccccggagcggaacaaacctacacggtggaagccatggtgcaggaccgcaaggccatccaggcagggacctcccacttcctggggcagaatttctccaagtcccagaacatctgcttcgccggaagggacaacacccagcaattcgcatggacaagctcctggggcgtttccacccgcatgatcggagcgctcatcatgatgcactccgacgacgacggactcgtctgcccgccccgcgtcgctccccagcaaatcgtcatcattcccgtcacgcccaaggaagaaagccgccaggccgttctggaccactgcgaggaactggcgcgcaccctccgcgccaaaaccttccacggccagccgctgcgcgtgctggtggacaggcgcgacctgggcggcggcgccaagaaatgggaatgggtgaaaaaaggcgtgcccgtgcgtctggaaataggcccccgggacctggaaaaaggctccgtctgccttcagcggcgcgaccggcccgccaatgaaaaatccttcgtcccggaaacggaactgatcgataccgctgcggatattctccaaagcatccaggacaccctgcttcagcgggccattgccttccgggactcccatatccgccccgcctccactctgcgggaattggaagaaaacttctccggagagggagatgcagactggctccaggtgccgtgggacgggtctccggaagaagaagaagaactggctaaacggctgcgcatttccatccgctgcatcccgctcggcgagctgggccgcggcgaaccggcaccctgcatcctcaccggacgtatgacgaaacgccgtgttctctgggccagaagctactgaaccctgacaccccctttcaacgggattgttccaagacaggcaaaacgggccttttcggaacaatcccgttttttacgcctctctgctttccccaaaaacggcatgaacaagaaacggagcggcataccccacagggcagaattctcccctctcctgccctatacgctggcaacaacgcacacatgtcggcaaaacaggatttttctctaaaaaaatcttgccaaggcaaaaaaaccttatatacttttggcacacggacgccgtaaggctccaatcgttccaagcggatgtagctcaggggtagagcgcaaccttgccaaggttgatgtcgtgggttcgaatcccatcatccgctccaattttttatagcaaaaggcccgcacagatgttgatgatgtgcgggttttatattatggttcgtacagaaaaacctgccccccctattgcaacaccgttccaggaaacaattttcatctgctctgatgaggcccaccggacgttcctcctccatgcatttcatggaaatgttgccgaaaggcggcctccgtcaacgttgcagacgttgccggttatcacaggcgcatcctgtattattgcttaatgattcagtatttatcctccgggacacaggcggacttaatgatcaccggatcaagaacctgccgccatctgtcatacgcggaatgatataacgcaaatcaggtttcctcatttaagcattcgaatattcgctgaagcatcagcgacagtttcattcctgccacgttctattctctcttgacggccagactgaccataagaagcgtattcgtgcaaagcacactgtcctgaacgattccccagatagagcgttcgtgttcttgaacgtgtcgtgtgtatagtacaactctttcatatgggtttccgtctcatcgtagacagaaaagcgaatgtttttgtcgaatagcgttacacaaactataggaaacaggatcaatgatggcacatgcttaaaataatcttataacgcttcgttcatcaactgccgcagaaagtcggtcggcaacgatgagaatctggctccctccatcaagaattagaaaaagataagacaagcagagcaattcccgtagaaatagggaacataattccgcatttatctaatagaaaagtctccatggaaaacatattttttcgcaacaaaccctgtaaggctcttcttttgattcagggggaattttgatttgcacttcgatacggcagcctttcacgaggtcagggttgtttaacagatactcctcgacttccggaggaatccgggcattcgttccgtcttcgacaacgaaccagatctcacaagttttacctctccaggaagctccatcgcctgttaatttcattccatgccgggcaaatatcttatggagttccaaatcctttttcactgttttcaacagagttacactcctcttcataccgtttcccttatctatgcccgaccagaagagggagaacggtaaataaatgaagtaaagagcggctattcctatgacgatccacattttctttttcattgtaaataatttatcggcattatttactttagtcttgtttcgttgaccttcccgattttttatcgaagcaatttactgaatatcaacatccagaatattctagaaatcttacagcaagattattctacataattccgaaattaaataactgaatcagaaaaaaaatattgagcatgtctactcaattaaacaattggcataaatttatattcatgccaattattgtttgggatgatgttttccttcaaaaggaataaatgtcttacccgacacccatgtcccctttataggagatatgtttatataatatgacccaggcgaaaggaagaccttttcttctttatctcgtttcgcgtataaaatacctttacgcagagcaaaatcaatgccaaagaattttatatgctgattttctttaagtataatttcttgtgttccccgggaggaatgaccaaatgttacaatgacttgtaaatttttagtcagatctctcaagataattcgatctggctccatatgttgatttttattttcttcagatattgcacaatcaatcaacaatattgaaaataaaatgataaagaatattgaaatatatttattgattttcatcgcatggacattcgatatttttttaatagcatctatttcatgttgattgacttttccataatatgtccttcatttctattcatttaatagaaaagtctccaaggaaaatatattttttcgcaataagtagtgtaaggataaccattatttggaggtgccatgatttgtacttcgatacggcagcctttcacgaggttaggattgtttaacagatactcctcaacttccggaggaatccgggcattcgttccgtcttcaacaacgaaacaaatctgacaagttttacctctccaggaagctccatcgcctgttaatttcattccataccgggcaaatatcttatggagttccaaatcctttttcactgttttcaacagagttacactcctctccataccgtttcccgtatctatggccgaccagatgagggagagcggtaaataaatgaagtaaagagcggctattcctatgacgatccacattttctttttcattgtaaataatttattaattcttttttcttattcgtgaggctctcttccttcgccatagcctctatgcccttgaggagctggagccagaagaggagtatcggggataaacggggctacaaaaccagctccttccacgatttcacacgaccatccgcagcaattccttgctcccgagttgtatagtgaatattgagggacattcttttcatcttcccggatctgctcttcaactttacttactgattcaggacaggctttataagcgtaggaattaccagaatacgcatgtttttcattagaggcatcatcccgaatttctccggctccaacgcctaaagcgcctctgtgccaacttccggggtaaaggcctctttgcatattgggtgttttgacccaggcatgtcctacatttcctgaccagtagctgcatggtttaaccaaaataaaaatttcctgtatttcatattcgcaacattcccttcctgcgtcatccgcaattttagagtattttacaccatccttgcaacattccgtttcagaatcttcagaaaggccaagcgtatcagagtacaggcatgtattgttcttgacgaagatataaagattccatccactctgttcatcggcaggatctctgctgatccacctaccattttggggattataatagcggtaattgtagtaaaccaaccccagctcgtcatcagcatactcgctggagaaccggaacggattcaactccgccgcattgccttccatcttcacggccgagccgtacgggccgtattcatacaaggctcggcggcccgccttcatgcacttcagaattccgtctttttctctccatgcatttacattaacttgattttttatactgttccatacctttggacatataaggaacagttttttgctcattgattgtatttccagtcccacattgtaccatagatgaaatttttcattttcacaaatgtattacttgaaataacgaattattataattagacaatctatttaatcatgtttttaattattctttttcaattaccttggaactgttgtttttcagaatctttttttcatattttcccaatattgatccacgtcagaatcataaatttcataatcatccccccaaccatagattttttttatgatagcaatggccttcatttttgtgaggatacaacttacttcaccaactgatataataaaaggaactattttctttccctgtttaataatttccttcgcttccttagaaccaagcgaaggattagttgttgctttgttaagaactctcctcatatctatatttgatcccctatcaggatcccaaagacccaaatattgccgccacaaatattgattgtatacactttcgttagaaaatgacaatttaactgctatcaaatttaaaattgcgattattactattgatttcatacttattattttctgtcgcaacaacaatatctttttgtttttttatcgtcaattatcaaaggcgttccaccaagatcttgcatacacttattataaaaggcgtttgtatgtacttgcgggtctttaatttctgaaactatcccaaggctccctacagctgcagaccagtttccattgggatcttgacgaactgcatgataactatcaggatcatcttcattaggttcgaaaccatacagcataacaacgtgctcattttctaaacagttgccctcaggcacttcacgacaatcttgagctaattctttaacagcttgatcataggtagtaccaattggcttttgacagcctattgcatgagccagacaattgggggaatttcttctggataatcgttataaaactcttgcggcatcaatgcagctggatgagctttgtattgaccgctaccttgaaatttactgaggcaatcattaatcattttttcaaattgttttgtttgcctctttgtttcctcatcgtattcgtacattcctaaaagatcgaatctaaatattgcgtgatttttcataaatgcataattattttgagtatgcatctctcctaaaatatcacgcgataaccatcttccatccttgggattataatagcggtaattgtagtaaaccaaccccagctcgtcatcagcatactcgctggagaaccggaacggattcaactccgccgcatttccttccatcttcacggcagagccgtacgggccgtattcatacaaggctcggcggcccgccttgatgccgaagagtgccgtcgtattcttcaatgcgtcatgcgtatagtaaagatcttccacgtagactcccgtttcatcaaagacgcccatggccagaatgcgcgtggccaccggttccagcggatcccacaggtacgttttacgcaggacgggtaccgcggattccaaaacctccgtggcatccagttccgcgatttgcaggtagccgtgatagatgaaccgtttccttgacatgagcgattctccctcatagacggatttttcaacccgcctgttcagataatcatatacgcattcaatacgcctgtccccctgtatgaagctgaccgcctgattcaacgcgttgtaggaggcttcccatgccccggtggcggtccggagcttcgtctggttgccgtcggcgtcataattcggcacaaaaggaacctcctcactttcggtgatatccgtatattgattgacccggttggcaacgtatgtagtgggaagggaatccgtcccctccagggacgttttgcggttgcctatgttatcgtaggagtagctgtatgtgccgccccggctcatcgcatcgctcacaagttcattcctgtcattgtaggcgcaggtgtgcgtcaggtcgggtgcaggcgcgttaaagtagtctttcttcgtgaccgggcgccccagtatgtcgtaagagtagtcggttttagccgggtagttggcgctgccggggcgcaggtagtcaatcttcaccgggaggtcgcgcttttcttccaaagtgcgccaccgtttcagggtgttggggtaatcaagagtgtccagcaggccgttttcctcattgtagccataggtgaagggcttcccgacggcgttcagcgaaacggaggatagccttccgtaggcgtcataggcccatgccgtctgcaagacgggggcgcccgcataatccagacagtagcccgcaggcctccccactccgtcacggcggagggttaagacgcttgccgcaaggccagccgtcgtttccgtttcctgttcgttatactggttgtacgtgaacatgcgcgttccggaagcgtcgtcaatctgcgtcagctgccccagatgattgtagaggctgctgatggagggggtaaaaccgtcatcattaaaggtaatggaaacgagctccccagtaaggggggcgtaggagcgcgaagcaacggttccccgcgcgtccgtcgtagcggcaacgcggttgagcatatcgtaaacggtatccacatgggtggcgtcggcataggttttgcggataaccagccctgtagcgatatcatacgtccatgtggtgatgtccccatccgtccggaggcggggatcagtggtaatgacatctccgggaacgcggaaggtggaaagtctcaccatatggccggcggcgtcataagcatatacggcgggctgtacggctgtcccccattcggcttccttgcggccccggatgtcatagaaagaacaggccgttttgccaagagcattagtaacgcaggtaggcagatcaaaaggctggccataagcgtaagtggtcgtgttgcccgcggcatccgtgccggagatgatgcggccggcgatgtcgcagacggaggtaaagacattcccgcgcacatctgtgtccgcgtaggtgatgcccgtttccgtataggtgcgccgccggaggacagttgcaccgtcaaatcccgtaaccgccgtcgtgaatccgtccacgatgcgcgtgaggaagacgctctcgacgccgggcacagttttcttccgcaggcgaacagaaccgccgccatattccatccattccacggcatcatggccgcgggaatccgtcatgacggttttgccggcaaggacagggctcagggcagagagcaaggtcgcccgcttttgaagaacaggagtacctgaggaagtatagcttgttatggaaacaagactatagactccgtcttcacggctctcggtcacataagcatagtcagtaatgcgggagttcaggatggtcgggtcatcctccagggcaacgattgccctggtcctgttcccaaaagcatcatacgcgtagagggcgggcgccatatccgccagctgttccctgatgaggcgccccttgttatcgtatgcaagcgtgcgcacgttttccccattcaaggtattggcggcagcgacccgtacaaggtcgccaaagccgttgacagtggagcttcccgtcacgacgcggggatcgtccccctccccgcccggcacagcctccgtcgtgcggatcccttcttccgtgacctcaacagtatagaggatatcctgctgcccagtgccgtaacgccgcaatattgttccggaagcacttttccgggtgatgagggtagcgccggcgggggtggtaacagtttctaccaggccatccccgctataggagcgaacggtggagcgccccagaatatcggtttcttttaccagacgccccagcaaatcgtattcccggctttccaccgtcgtcattgggcctgtatccctgcgcagggaggtaattttaccgagggcatcacgagtgtaactcgtgatggtttccggagtgatcatggtttccccgtctgcaatggctgaacggatggtttctgtcagctggcgggccgtattgtaggaataggaagtcgtcacgccattctcatccttttcccataaagggccgcaacaggtcatcatgcgctcgtaaacgcgtccattggcgcgggtgcgctttacccaacggttctcaacatcatattcataagaagacgcatccgtcattgaccaaacaccatcggcaagctgtacgtattgctcataacgcatgttattgccctggccggagacgtaagtaaccttccgtgaactcaggccgggcacacacgcacccgctatccgcgtttccgcggtcaccttgtaaagggatccatactggtccgtctcttcataagcgtaatgcgtttgaattccgcccatgtcctgtttcattttcaagcgtccgcgggcataaacattgggagccgtgccaagccaggattccttcacttccagccgtacattttcttctcccaatgcggtggtgcgtttttccacgcgccgcacatgattttcctcaatgtaagtataatccgttcgccagagttccgccgcagtagccgtcaacgtcacccattgggtgagaatatccggatccgcctgcgtctgatcccgataagtggtgtaagtgactttatctccagcttccgcccaggggacactggacacgatttcacgcccaaaacggtcgtacgcccatgttttgacacttccgtcaggagcagtttccttcgcaatttttcccatgcctgtgtactcgtaggtcgtctcccgggcgtaatccgttccgtaaccttcaatacggctggtgtacaaattgccattgcgggtgacggcataagtctcacagacacgggagatagggataccgttttcccctctctggatggtagtgatgagtttccacgttccgggagagacaatctgcttttccttcagagtgaagatggaatcttctccttccccctgagacatgttccatgctccgtcagttccctgccagtagcgggtggtgaagggcgcgcgcccggcggtttgttcggtgacggcaagcctgcccgctgccgcgtccccggtgatcgtgaatgttttaaatgggtcgcccgtaacgggataaaggccggtggagctgtttttcccatccacctgttcggggaggtagagggcgatgcgatatccggattccgtgacattttcgatgttggcaagtccatcccacaggttccatatctgccgaatgcttccatccgaagcccgcacgatatccagctttccgtcaaattcttctcttgtgtaggacgcgccatttttagcggtgtagccggtggcgtatttcaaggaagaggccacacctgcggtatagttaacagtattacccgcggttgaacgaatactgaggcagaattttcccgcctttgctgaagaagcggacctcctcccgaaccacgcagaccctccgcgcttggcggatcccgcaatgggggcaacactgtcaaccccgctgccgcctccatccgcgtagcagtagtaattaatgtcagttcccccgctcctgatttggaaagcggtattcgctccaattcccgacagcggcaccgaaatgatttcatgagtcatcggatgccagtaatggagcgcacgaggggaccagagttcagacgagaatgtgtaccctactatgtccagcaacccctgcggcaaccccgtcatgccccggaaagagccaaaattggtacgccagaccatttccgtcttgagcgtccgggcgaccacgcgcctgccggcagccgacgagccataaagggtggaggaaccgcgcatgccgtgcgccgaagagctgctgctgccgccctcattgttttcacaggtacagggggcctcgtcttcaccgttatccccttcaccgttgtcttcctccggacagggaaaaccggaactgctctgagagccattgccgtcccccccgcattcacacggcacgtcttctccctcatcttccgtactcacaggttccggataaccttcatccggctgataggaggatgaagaggtgccatccgagaccatgacttcaatggaataattaaggattgccagattagtccattcaggaggaacagcaacgttctcataagtcatgtgtacacggtgcggtcccggttcaatgggaaagctcaagcttttttccctataagtgcctccatggtatttaccctcccctggaatgaaaattccttcaccgtcaacggtcagagtaccgttatcatctacccccagcattaaacggcactctgccgtttcccccggaccgagcggaccaacaataatcccccaatcccagctgccgctaaacgccccggcctccttgtcaaacggagcaggcccacctccggacactgagagagcattatcaggcagagaatccacatgatgttgaaactgccgttttttcatgaaatacaaatagttagatattaaggaacaaatatcgggaagcccatgcttccctgtatttattattcttgtctatttcaggaaataaaacagaacaaggatttatttttgaataattgttattaacaagaataaatttctatcaattaacattttataaaatatatatctttcttgaaaattcataagggataaccatgtgttgacgcgtttcccaactcccggccattcactgccggccaggatatcccatccggaaggtctgaaaatttcccggcctccattaagacaaactccggcggttctatctgcatcatcccttcaacgaaaggttctcccgcctggtcgtccagataaggccggtgtcggcactttctttacgccgtcccaattctcaacccggaataaaccaatgaataatacgactcaaccaggggctgctccaacaggccccgcaacaaccaataacgctccggcggtaaaatccgtcctccgcatgggagtattcactctcgccatgatcaacgtttccgccattgtcagcctgcgcggcatgcctgcggaaagcacttacggactgagttccgttttttattacattttcgccgcggtattctttctggtgcctgtttccctggtcgccgcggagcttactaccggatggccccaaaagggcggcgtttaccgctgggtaggcgaggcattcgggaaaaagtgggggttcctggccatctggctgcaatggattgagagtaccatctggttccctaccgttctgacattcgccgccgtttccctggctttcatggggcccggacaaagatgggatgaagcgcttgccgccaataaatggtatgttctcatcgtggtgctgtgcgtgtactgggcggccaccctgcttaatctgcgcggcatgaagacttccgcaggcgtcaccaaatggggaaccatcatcggaaccattattcccggagccatcctgatcctgctgggcctaggctattgggccggcggcaacccgatcctgctggatatgagctgggacaagctggtgccggacatgagcaatttcaacaacctcgttctggcagccagcatcttcctgttttacgcagggatggaaatgtccgccgtgcatgtgaaggatgtgaataatcccgggcgcaattatccgctggccattctgatttccgccatcatcacggtgcttattttcgttctgggcacgctggccatcggcttcatcattcccaattcccagattaatctggtgcagagcctgctgattacttatgacagctatttcagcttcttcggcctcggctggatgaactggattctggcgcttgcgctggccgtaggcgttctggcccaggtaaccgcatgggtgggaggcccttcaaaaggcctgtaccaggtgggcctggccggcaaccttccgcccgtcatgcaaaagcggaacaagaacaacgtccagatgggcatcctttttatccaggggggaatcgtcaccctgctttccatcatgtttgtgatcatgccttccgtgcaatccgcctatcagattatttcccagctgaccatcattctgtacctcatcatgtacatgctgatgttcgcgtcaggcatttacctgcgctaccgggaaccgaatacgccgcgtaccttccgcattcccggcggcaaaaccttcggcatgtggattgtcggagggctcggcttcctggccagcctggcggctttcctggtgagcttcatcccgcctaaccaaattaccgtaggcagcagtaccatgtacattctccttctggtggtgggcaccttcattttcgcgggtattccctttatcatccatgccatggccaaaccctcctggaaacggccggtggatcccgaagacgcctttgaacccttcggatgggagaaaaacaatgattcccattccgcagcaacccctagccattccatatcccatgagtaacattccttccaatgaacagatccggacggccctggataacgcatacgcctacgccaaaaccgtccagggaggcaaaaacgcctcgtacattcccgccctggcccaggtgccttccgacctgctggcgattgccgtggtcaccgtcaacggagacctcctgaccgcaggctccgcggacgcgcccttcgccattgaatccatttccaaggcattcaacctggcttatgtcatggatctgatcggcatgaagcagctgcgcgcgaaaatcggagcggaccccaccggggaacccttcaattccgtaatggccattgagctgcacggcggcaagcccctcaatcccctggtcaacgcaggggccatggcgacggtcagcctggtcaacggttcggattccgatgaaatatggggaaacatgatccataatttcaataatttcgccaacacggctctgaccgtgaaccaggagatttacaagtcggaaagcgctaccaaccagcacaaccgcggcattgcctggctgctggacagctacggctatttttacaatacgccgcccatgattgtggatttgtacacacgcatgtgttccctgaatatcaccgcttcccagctggccctgatgggcgcctgctacgccaacggcggggtcaatcccgtcagcaagaagcgtgtggtgaaagaggagaacgttccccccattttggcggaaatgtgcatgtcaggcctttatgattccacaggggactggatgtacaaggccggccttccggccaagtccggcgtgggaggcggcctggtggccgtagctcccggcaagctggccatggcggctttttcgcctcccctggatcccgcagggaataccgtcaaggggcaggcggcgcttcaatccatcatcagggaactgaatctaaaccttttccggagctgatccgggatgagaaggtaaacccgcggagccaaaatccgaaaggattcccgcgggtttactgtatcctgtccagccccccgaggcagaccgcagtttctcgactgcggatttcagccataaaaaacagccttccggcacagtatgctgaaaaacggatatatccggcggacaacggccgcatcgcctgcgccccggcagccgcaggcaatctttccccggcgccccgcatcagctcctgtttgaaaagttgcacagctgcatggctacgccgtcttccataacccggaagccgtgcttctcataaaaagcggcgtttctgctctcctccggcatgatttcaagatacaggtagtccctgtatttttccttaaccatttccaccatttttccagcaatccccctgccctgataggcgggatgcaccagaacataatgcatgtaggcaaccatctcgctgtcgtccagcacccgcaccagccctgccaggcggtcaccatcccaggccgtaacaacagtggacgaattcatgagagccttgaacagacgccccggatattgtccggaaatccagccaacggacaggaacaattcttgaacatcttccctggaaaatttcttctcttccgtaaaaacaatcattttttctttaattaattattgattatccgcctgtaccgtcgcggccacacaaccgactgagcgggaaacgcctttccctcggccggattgacaccctgtttcaaggttttatctgttcccactgccgcagtcaacaccgtcttgtccgagggttttacccattccaaggacatggcggagcctgtgataagaacgcgcgcgccggaaacaggcaaccctttccccagtcagcagctcgtccgcccctgcctcctcagcttccggggaaggaagagccgcaccaggaacacacatcttcttttcagggaaacgatactcgaatacgggagacggcatttttcctggaaccgattccccaaaaacggaaaactccgggcccaggttcataacattgtgaaaaacctttctccgtcatttgtttaaggacttgtcaccacgcttcttttccctagaatccccccggtatgcttgacgccctccaaaatgcctttttccagaccggggacacgctcacatcctggctgtccgctttcagcagctttctgtgggggtggcccctgctcatcatgctgctgggcacgcacctgtacctcaccgccatcctgcggtttccgcagcgttatctgcttaaggccctgaaattgtattttgtgaaagatcatacggacaagggagatatctccccattcagttccctgatggtggccctggcagccaacatcggcgccgggaatatcatcggcgtgggcgtggcgattgcagccggaggccccggcgccgtcttttggtgctggctgacgggagttctgggaatggcaacccgttattcggaaggattgctcgccatcaaataccgggtggaaaacaaggacggcaatatgagcggaggccccatgttcgtgctggaacgcggtctgaacagcaaatggctggggacagccttcgccgtcttcacggccattgccgccttcggaatcggcaatttgacgcaagggaacgcagcggcggaacagctccaccatgccttttccattcccttctggggaacagccgccgttctgacggcattgacggctctggtgatgctgggaggcatccagggcattgccagggtatgcgctttcttcgtgccgttcatggccgtcatctacatcatgggatgcctgtatatcctgaccatacaggcagagtatattattcccgccatccggtatattctggactgcgccttcacgggagaagccgccgccgggggcgcagcaggagcggccgtcatggcggcaatgagaaccggtgtggcccggggccttttttccaatgaggccggcctgggatccgcagccatcgcctccgccgcagcgcagaaccgcaaccccgtcaggcaggcgctcatctcttccagcggccccttctgggataccgtcattatctgtgccctgacgggaattgtgctgaccaccagcatcatcgcgcatccggacatttcctgcacggacggccccaggcttactacgctggcattcagcaaaattccttacataggctcccctctgctcacgctcagcctggttacgtttgtagtttccaccattctgggctggtcctactttggagaaaaagcgctggaatacctgggaggcatccggctgatcatgccttaccgcgtcatctgggtggcggcggtcttcatcggctgcgtctctaaaatagaactggtatggatttttgcagactgcgccaacggactgatggccctgcccaacctcatttccctgctggcactttccggcgtgcttgtccagcaaacgcggtactacctctggcagcacaggctggacgattacgacgaatcccacataccggaaggaaaataacgatttttttaactcggattcaaataattcttgcctttcggcttccggtagtatttacttcgccgcgcagtccctgcaaacctaaaagtcgcgttcgtctagcggtccaggactcccgcctttcacgcgggcaacacgggttcgagtcccgtacgcgatgccagctttaccgccgcggcagttacgataattccgcttttccccttttcagggaagcatattggaaaaacgtaatggctgcggttttcttttggcccggttttccggattcaggaaagcgcggcagaggcgccggaagccgaatccccccctgcttttaaatgccggaacatgtcttacatcccccggatttggctttcagaaagccccaccatcttttaaaattctttacacgcaaacgccatggattacacacctctcattgaaaaacgccgccagcgcctggaagaattggaaacagtcattgccgaaccggacttcttcaatgaccagaaaaaggcctcggaaatcatgagagagcaccgccgcctgaaggaactcatggaaacatgggattccctgaacgccacggaacaacagctggcggacaaccaggaactggccaagacggacgatccggaactggcggaactggccgccctggagattccagaactggaagccgccctggaaaaactgcggagcgacgtgcagtacagcctgctgccccgcgacacgacggaagaccgggacgccatcattgaaatccgcgccggaacgggcggggatgaagcctccctgtttgccggagacctgctgcggatgtaccagcgttttgcggaagaacgcggctggcgcttcgagcatctggaaagcagcccgtcggacgtgggcggattcaaggaagtcgtctgccgcattgccggggaagaagtgttccgcttcctgaaatatgaaggcggcgtgcaccgtgtgcagcgcgttcccgctacggaaacgcaggggcgcatccatacttccaccgccactgtggccgtcatgccggaagcggaggaagtggacatagaaatccgcccggaagatctccgcatcgaagtatgccgttccggcggagccggaggccagcatgtgaacaaaacggaatccgccgttcagatatggcacatacccacgggcgtttatgtccggtgcgaggaagaacgcagccagatgaaaaaccgagaaaaaggcatgaaaatcctgcgcgccaagctctttgaagccaaaaaacgggaagaggcggaaaaatactccgccgcgcgccgcaatctcatcggctccggcggccgtgaagaaaagatacgcacatacaacttcccgcagaaccgtctgacagaccaccgcatcggctacacttcccacaatctggacggtatcctgatggggcagctggaagacctgattatggccctccagcatgcggaaatgcaggaacgcctggcggaggccggaatgtcctaacttcctttttcctttcatgaaaactttactggaagtccttcaggccggcacggattatctggcccgccaggggtgcgacgaagcacgcgccaccatgcagcatttgctggcccatgtcctgcactgcaaccgcacggctctttactcccagtttgacaggcccgtggaagaagcggagctggcacccctgcgcgaactgctgaaacgcagggcagcgggagaaccgctgcaacatctgctgggggtcacggaatttttccggagggatttcctgacggatgcccgcgccctgattccccgcccggaaaccgaggaactggtggaaatggtgttaaagaaaatcccggaccatccggtacgcatcctggacatgggcacgggctccggcgttatcggcgtcacgctggcgctggaactcaaggagcgcgccggagaagtcgtgctggcggacatttccccgcaggctctggatctggccctggaaaatgccatgcggctgggagccagagtctccaccatccagacgaatctgttcgccaacattccccaggaaaaaacggatccgcatgcggaggatgccgattctgctccggagggagaaaaaggggaaaacgggcggaacatgctctttgacgttatcgtggccaatctgccatacattgcagagggggaaaaacttgccccggaagtcatgaaagacccccatacagccctgttcggaggtcctaaaggctgggaaatcattgaacgctttctggcccgcgcccgggattacctgaatgaagacggctttgtagccctggaaatcgggtacgaccaggcatccgtcgtaacgcaaatcatggatggatacggctacaattacattgaagttctgaaggacatgagcggcgtctcccgtttccccttcggctatcgttaatgttatcctccttttcactccatgcagacggcgcgcattctggttgacggacaaagcgatctggtactggattacggtattcctccggaagcgggagacgtcaagccgggctgccgcgtacaggtgcccctgcgcaacagaacggctaccggaaccgtgcttacgctgtcagaaccggccccggcctggaaggacaggctcaagcccattctgaaactgatcgatccggatcccctgatttccccggtgatgatgaatctggcctcatgggcggcggactattactccgtggctctggatcagatgatccggtgtctgctcccggaaaccgttcgtcaggaaaatacggcggaaaaaatgcgcaaaatggtgtatctggaaaaaactccggcacgggaggaactggacgccctgtaccgcaaagcaccccggcaggcccaaatgctggattatttctcatccgcgaaacaacagtccgcccccctggcggcattcggcgccggagccctgaacgttgcccgcagcctggaagccaaaggcttcatttccctgaaagaagagtccgtgcaccgggaccccagcaccggggagcaattcgtccccacccagcccatgaagctgaacagccagcagcagaaagcgctggaagaaatcacggccatgtgcgcggcagagcgcaaaaaaccggtcctgctgcaaggggttaccggttccggcaagacggaggtttacttacaggccgtttcccaaatagtaaaatccggaaaatccgccctgatcatggtgccggaaatttccctgacgccccagacggttcagcgtttcaaatcccgtttcgcggaactgccttcctccgtggcagtgctgcacagcctcctctcggacggggagcgctttgacgaatggcatgccatccgttccggaaaagcccgcatcgtcatcggtccccgttccgccgtcttcgcccccctccaaaatctgggcctggtgattgtggatgaagaacacgacgcctcttacaaacaggaaagctccccccgctaccacgggcgggatctggccgtgctgcgcgcccatctggaaaattgcgccgtgcttcttggctctgccactccctccctggaaagcatccataacgccctgactggaaagtattccctggtaaaactgacggaaagggcggacggccagcagctcccgctcattcgcatcctggacatgaaaacggaaggaaggaacaaatccggtcccaacgttatctccgaacgcctcaggatgtccattgaccggcgtctcgacaagggggaacaggtcatcctgctgctcaacaggcgcggattcgcacgctccatccaatgcccggactgcggccacgtagtcacgtgcctgcactgctccctgcccctgacctaccaccgtacggaagaccgcctcatgtgccacctgtgcggattcaaagccctcccgccccgttcctgcccggaatgccggtccgccaacatcctgctccaggggtacggaacccagaaggtggaggaactcctgcgccgcactttccctgcggcgcgtatcacgcgcgtggatgcggacgtggcccggcggaaaaacgctgtccggaccattctgaaccagtttcgcgcccataagatagatattctcctgggcacccaaatgatcgccaaaggtttggattttcccaacgtgacgctggtaggcgtactgaacgcggacctggggctccacatcccggatccccgtgcaggggaacgcactttccagctcctgacgcaggtagcgggccgcgccggccgcggcgatctttccggagaagtcattatccagacttttacgccccagtccccctccctgcaatacgcccggcaccatgacacggacggctttgcagcccaggaactggaaatgcggcgtactttcgacctcccccccttcacccatatcgccgtattgaccatacgttcccagcatgaaagcatggcggaattcgccacgcaaaccctcgcggcccgcctgcgcggcatgctcccccctcccgccacgatgaccgaccccatgcctgcccccatcccccgtgcgcacggacagttcagattccagattacggtcaaggggccatccgcccgcatcctctcccgcactctccggaaactggtgcaggaagccggcctgggggaagacctgacggctgtcattgatgtggatgccatgtcattcatgtaagccgccttgccaaaaccggccgggaacattagacttccggcacaacacaacttactattatgctgcttcacttctacaagatgacgggtgccggcaacgactttgtcatggtggacaatcgtgacctgagcctttcctccgtgctggacaaagaaaccatagaagccctgtgtgaccgccgcttcggcattggggctgacgggttgatcgccgtggaaccctcccagggcaaggggggaattgttcgtatgcgttattacaatgcggacggcggagaggcggaaatgtgcggcaatggagcccgctgcttcggcaactttgccgccgccctgcttcatcacgacaagacagccccccttccttttgaaaccatggccggcgtcgtcaccgcaacctttgaaaaagacggcaacgtcaccgtaaacctgaccaatccccactccatgcagctcttcgtgctgaatgccgatccgactgtgggggcggatgtccatttcctgaacacgggcgtcccccatgccgttgcgtttctggacaagctggagggcctggacatttccaggctgggagcctatctgcgttaccatgaggccttttcacccaaaggcaccaatgccaacttcgccagaatcctgtctccggggcacattgccatacgtacttacgaacgcggcgtagaggatgaaacgcttgcctgcggaacgggaatgaccgcctgtgcgctgctgcatgccgtattgacggacgccccctcccccattcaggtggacgtggcgggcggagacacgcttaaagtcggattccaacgcacaggggaccgttttactgacgtcacgctgaccggaccggcagaccttgtgttcaccggagacattcagatctaaaccgcttcggcctgaaaagtcggactccttcccatcagggaaattatctgttcaacagggaacattccgcccgcacataaccgccgtaattattgcagaacgccttgtacagggcagggcccatattcgtttcgcaatagtactttacggtaataaagccgttttcgcgttccatattaagaaaacggctggacagcagtaccagattgctctggtaattccacaaagccatgtcacgctccatttcctcatgaatcctgtcgcatataaagctctccggaggaggaaacagaatggcgctgacaacaccgatcagacagattcccggaatgacccctacggcaaaaaccccgtgacatttcctgatcaggggaaggtgattcctgaatttccggaaaatggtaaaacggaataaataacctgccagcagcgccaccgggaagaacacattcacgtactcaaaagccaggctcattcctccaagaacgaaaaaaccgatgcccttccacaccttccggtaaacaggaatgcaggcacaaagaaacacgtacagaagatatcccagcaggcaaaggaaaggcagaagcgttcccgtaaaaatatgctccaccatgcagtcccacggatattccctgctgggagcgaaagcttcatggaaaaacatgcatactatgctcaaaagcaccagcgcggcaaggaggatggtctttactttttttgactcgtacaaaagccacagcaaaacaactccgaacggcaataaatagcaacctatactgttgaatacagtggacaacatgggaatatgaggaaagaaattcatggagcggatacggataaatgagcggttaacaactaaaatgcagtagcggcttcagcaacagtaattggaaacaaaataaattcaaacactcgttttcaaataacccataaaaaatcatattcttttcacgaaaagccgttcagccgggctctcccacttgacaaaacaaccctctgaaaaggatagtaacgctcttgtgaaacactcccttttcatccaggccgtcctccttccggttctcttctgccttccccaatgcagccgcaaaccgctccttccggaatatacgcctctgtgttccggaatggtgccgggagaacacactgcccactgggccctccgggcacgggaaaacagaatctaccgggtcggtccgaaaggcggtgtatattacatcaattcccataataaaaaagtttacatcaaatccaggagggtgcaatagaagaccacacggtttctccgtaattttccaaatgggaaacaaataaccgtcctatcatgttcttattgtataattgagaaaatattccgttcaaaaaactcattaaactcattttcttcttgccaaaatggaagaggacgggtaatgtctgccgcaccacaacactaaatggtgtcggtagttcaatggtagagccccagattgtgattctggttgttgcgggttcgagccccgtccgacaccccatcccctttccttcataaaaagagcacttatagtgctcttttttactatccccagccctttccgcatgcgtaatccagaattcgtcaaagccgctttttccgctattgccccgcgctatgtggctaccaaccatgtgctgagcatgggtgtggacctgctatggcgccagcgcgtcgttcaacttgtctccgaatggaaaccggaaaaccttctggatctggcgactggaacgggagacctggccttggccatcctgaacgcgatgccggaaatccgcctcaccgggtccgacttttgccagcccatgctggacatagcggccaggcggggactggatcatctggtttgcgcagacgccatgaacctgcccttcccctccgcctcctatgatgcggtcactgtcgcctttggcctgaggaacatggccagctatccggacgccctgcgggaaatgggccgtatgctacgcccggggggccatctgctcattctggatttttccctgcctgaaagcctgttgaaaagcccttaccggttttatctgcaccgcatccttcccgtcatcgcagggtggatgaccggccaccgggaagcatacgactacctggcggacagcattgaagccttcccctgcgggcaggccatgaaggctctgctgtgggaatgcggctacagcaacatcacggcggaagctctgaacgggggaattgccagcatttacacagcccagcgatgagtgcgggggacgcaagagaaggcatcatacgcggcaaggcggcacgcgcccgtctgggcggaaaacttgccggactatccctgccccggcaaatcgccgtcattgctttctggccattcctggaacagctgctgagctttttcgtcacctcgtccgaccttttcatcgccactaaaataggggtgaacgcccaggacaccatcaacatctctgacggcatgggcgccgtcgtcttcatcatgtggttcggcttcgtcatccaggggtctatcatgatgggagccacagccatcgtttcccgcatgacgggcgccagggactatccccaggcccagcatggcctgcaccaggctgccatgctggggctcctggcaggaaccatctcctgcggacttctcttcacatgcagcgatttcctggtcacgcacgtactgaccatgaatgaaaccgcccgggcctacgccctgcaatacgtttatatggccgcatttgcggccccgttcagcggcgtggtctttgccatcaatgccgccctgcgaggctccggagacacgcggcttcccttctggatcatgatgagcgttggcatcctcaatgtcatcttcagcgtcatcttcgtctttgcggacgctcctctgggcggctggcgcatcggaggaattgcggcaggaacggtctgcggctacggaatcagcatgtgcatcctcctgttcatcatgctgcggcgcagaaaaaaaatcttcacgggcaggaaaaatgaatccctggaagaacttgtccgggaacggggagaacactatgcccctcccctgtacctcagcttttcccatctgcggccggacatgggcatgcaaaagtgcatcctgaaaatcgggctgccgcaggccgtggaagtcttcggcatgtggggcatccagatgttttgcctttccatcatcagtgaactgcctgttaaaggcgtgctgggcgtccacaatattgccgtccgcattgaatcgctcagcttcctgcccggcttcgccatcggcatggccgcttccacactcgtggggcaatacctgggcgcccggaacgcgcttatggcccgcatcaccatctggaaatgcatgcggtacgccgtcatcttcatgacaggcctgggagtgctcttcagcgcctttcccgccctgttcatggagatattttccaacggcagcacgaccctcattgataccggaatcaccgtgctgcgcaccatgctggtggtggaacccttcttcgccgcctgcatcgtgatgaaaatgtccctgcgcggcgcgggagacacccggagagtcatgcttatttcctacggcattatgggctttttccgggtcgtctgcacctgggtatggttcaggctggcaccggaaaccatgactttgtggggcatctggctgattttcgcctttgaaatggccgtccaatccgccatcctctataaaattgtcaaggggcggagctggacgaagctgcaagtctgaacctttctccggcctctcccgcctcccggcccattcgcaaatccaaaacgtttactgcaggataaaaactttgctttcctcctccaattctgctagcatcctttcacgttgttctgcaacgggctcgtagctcagcggttagagcaggggactcataatcccttggtcgtaggttcgaatcctaccgggcctaccaaaataaagccttacaagttaaccacttgtgaggcttttctttctcttcctgcttctctcaaaaattattaaaaacgcgtaaaaacgtaccaaaacgcaagaaaagttgcaccactttagcatcaccatttttgctacagtagcagaaaccgcatgagaagaggagtcattgccggaattacaaatagctggcagaagaactggaaagcaggaagacttctcatcattcctggagactccgtagatcattaggtcgtacagccccccctatgcaaagggtaggtgaacggtataaacacacctggcagcgacgacattctttatgctcgcgattcatcggaaaaagttcttggagttgcagatgagaggataaacttgaggttacgaaaatcgaaacgatgactatcaatcacgcaattttaagggttacagcaaatccgtggaacctgggacgcctggggcaccgaatgttccttcttcagggaagggacatttttcacagggacctggctgggacgaacaaggaattaaaggacttaaaggaactgttccagccggaagcggtcagttgcgttctgcctctatggaagacttttccaacccatgaatgatgcctgagtcaatagcaggcaagacattgattataaaatcatcatctcattttttgtggaatatatgcgttataggttggccgggaacagaaattttcaaacaaattcttattgacactgattccggataatgctagaaaaaagactactactgggggttgtttccttttagcgctttgttgattaatcctcaactcttgaatacctgatgaatccgcctcatcgttctgccgttcccgcttaccggaaatggtactttggagccggcggcagccccggcaggcggggcatggaggcagctccggagcccgatccgctgccgtttgaagcgatccggatccatgaggaaaggaacgtggggccgccgagcacgtcggcggacggatacagcgcgcacgggacattcaccatcccggaaggagcggagggcaaaaagctctacggcacctgctcgctcttccttggggtggacgactggggaatcctggaagtaaaggactccggcggcaaggtggtggcgcaggtggacctgaaggaaaacccgcagacggcgggcgagcagggcgggcacaaataccacacggggaccggcggggcgcagctcccctccggcacctacagctgggaagtcagccagaccaacatcgactacaatccggcaagcggcaacacctccatctgcaactacagcatcgacgtggtgccgacggaaccggggggcaggaaagaacccgaaccgtgtccctgcgagggagacacgtgcgacaacagcggcggaacgccgccttcccggtcgctggcccggtcgggccctgaggcgggcatggaaagcggcgccctgggaaactacagctcggcggggtgcagcgtgacggcggaaagcacggccacgctgatgtactggtcctgcaacttcggagcgttccgtggacttgggggccttccggccggaagggtggaactgaggggtgaagaaaacgtctccggcctggaaagaccctcctcactggcctacaaccatcccctgaacagccgtctggacgtgccggaagggggcattgtccccggagcacggtttaatctggtgcagggagaccgggtaattgccatgcgctgctacacggacgggtccgtgctgcccatcggggtggacacgtcgggcggagggcgtgcggcgctggccacggtggaaggacaatcctgcctgcgctgggtggtggaagacggcagccaatacctcttctcggcggaaacgggaacgctcctctcctacaccaccacggacaggcaggtcatctccaacgcgtcatcctatctggacgtcaggcatgccggagacggctcgctgaggcaaatctggaacctgtgggacggcctgctcaacgtggaaaacgtcacctccacgggttacgtcatcgcgctctatacccctgggcaaatcaccggaacggacggacagggattttataccgttacgggcgctcccttgaaaacatttattctttccctggatgctgaggaaaagttcaccatcacggaacaggcgcctgccaggcagccctacgccgtcacctggtggaacgacggcctggcgtggaacatgcggcagggcacgggggaagacgccctcacgaccctccgcacgcgcacggagctggaaccggaaaactcggtctggcagctggtcacggaaatctccaaaaacggaatcgtggcggcgcgcacctgcgccatctaccagaccacggacgtgggcgacctgctgctcacgctggcggaaggctacggaagcccggaggagcaaaccacgcaatacgcctacgaccagtgcgggcggctcagaacggaaacggccccggacggcagccagactcattacgcctatgacctctacggccgcctgctcagccgggacgaaccgtgggcggaaagcggcaggcgcatcacgcgctacacctacgcctgttcgggagaagccgacttcagcaacgaacccgccacggaaacggcagacctgcttccgctggaaggacatgtcaaaacgctgacatccaccacctggaaatacacgacggccaaccacatcaaaagaacggaacggcgggtcacgggcctgggtgtggcgggcacgcgcctgacggcggaggaacaatggctggccggagccgccaacatccatgcccgcggacgcacacggttcagccgggacctcgacggcgtgcaaacgtggcacgactacgcggccacgacggagcacggcgccctctacacggaaacggtggaaacgcgcatcaacggagaagccgtgccgggacaaagcacgcgcgccgtcacctggatcacggcggaagggcagcgcgtcagggaagaaaactacctcctgctttccaccgggcaatgggcgctcacgggcagcgccgtctacgaatttgacacgcagaaccggtgggtgaagcggacggcgggcaacggccggctcacagagcgcgaactgatgtgcgacggaggcctgctgtgggaaatcgatgaaaacggcatcaggacggactacgcctacgacacggcgcgccaactggtggaagtcacgcgttccgccgtgatggacggggaaaccgtcatcacgccggaaaccatcaccacctacgcccgggatgcggcaggacgcgtactctccacgcgtcaagacacgggggcgatgactacccaagaaagcacggagtacgacttgctggggagaatgacttcctctacggacgtcctgggccgggtcactacctacgcctacagccaggacggcttgacggtcacgcaaaccgtcccttccggggctacattcatcacgcgcagcgcgccggacggaacggtgatggaagaatccggcacggggcagcggcacgtcatctacgccatcgacctggtcagcgacggtgtgcggaccttcacgaaagccgtctccggggaaacgcaaaccgagctgcagcgcagcattgtcaacggagccggggaaaccctgcgcacgggcgtccccaacaccgtcggcggagtcatttacacgaggaacacctacaacgccagggggcagctcaccaaaacgcagacggacgcgggcaatgcggccacgacgatggacccgaccctgtgggaatacgacgccttcggcaacaaaacgaaagaaacctggaaactcgccgatccggctacggtgtccaactcgcgcatcaccacgtggagctacggcgtggaacaggcccgggatgaagtataccgcgtcgtcacggcgaccaggaacaacagccggggaacgacctacgacgaaacgcagaaaacgctggcttcctccctctcgtccacgctggaaagcaaagtcatttccatcgaccccaggggaaacgcttccgaacaatggagcgaatacggtccgggcgccgtccggacgcagaaaagcagcatccccacctccgacatcacggccgccgctacggtcatcgacggttttatcatctcgcaaacggaccatgcgggcgtcacggccacgcatacccgcgcctacacggaaaccggcgtcatctacgccagcacggacggccggggcaacacggtcacgacgcacaccgaccttgccgggcgcacgatctcggtgacggacgcggcgggcaacacgacttctaccgcctacggcccctggtttgaccagcctgccgtcgtcaccaacgccctgggcaacacgacctgctacggctacgacctccggggccgcaacacggcgcaatggggaacgggggcccagcccctgctcttcggctatgacgaggcggacaggatgataagcctcaccacgttccgggaggacgcgggcgacatcaccgccgaccccacgggacgcacggacggggacgtcactacgtggagctacgatgacgccacgggcctgctcatccgcaaaacctgggcggacggcacccatgaagacaccgcctacaatgccctgaacttcaaatccacgctcatggacgcgcggggggtggtcaccacctggggctacaacctgaagaagggggtcaacaactccgtctcctacagcgactccacgcccggcatccagtacgcctacaaccacctcaaccagctgacccaggtcacggacgcctccggctcgcgcgtcctcacgtacaccccctgcaacgaaccggacaccgacagcatcaccatcggagggagctcttaccagctccaggaacactacgacacttacggacgctcctccggctataccctgaaacagggaaccgacgtcctccaggaagccagccagggctatgaaaccgacggaaggctggccagcgccggaatcaggcacgggggaacggagcaaagcttcgcctacggctacctggcaggaagcagcctgctctccagccttgcgatgcccgacggcatcgtccgggaacttgcctacgaacagcggcgtaatctgatcaccgggatagactgccgcctgggggaaaccgtgctcgtctcccggacccagagctgcgatgccctgggacgcccggtcacccgcacccagcagcgtggaacggaacccgcccgcagcgacagcttcagctacaacggcagaaacgaactcaccggggctaccctgggcgccgccccctacggctacagctacgacaacatcggcaaccgcaagacggcacgggaaccggccgaggaactcgcctacgcggccaacgggctcaaccagtacaccggcattgaagaaagcggggaagcgccttttgtgccgacgtacgacgcctcgggcaaccagaccctcatcaagacgtcaacgggcatctggacggccatgtacaacgcggccaaccgcgcggtgagcttcaccagccggaatggaaacacgattattgagtgcggctacgattaccagggacgccgctacatgaagaaagtgacccaaaacggcacggtcgccagccacgaacgctatctataccgcggctatttacaaatagcggcattggatatgctggacaaccggaacgtgcttcggacactgctgtgggatcctctggaaccggtggccacccgccccctggccctcgtgcagggcgcttccctgtactgctacggcgtggacttcaacaagaatgtgacggaggtcttcgacgcacagggaacgatcgcggcggcttacgattactccccctatggaacagccacccgcaccggaagactcgtccagcccgtacagtggtccggcgagatgcacgacgaagaactcgccctggtctattacaactaccgctattacaaccccaaagacggcaggtggatcaatcgcgatcccatcgctgaagaagggggtggaatttgtacgggtttgttgataatggagtggtattttctattgattatctcggaaaagaaactaacgaatttggctacacaatgactattcctgcgggttacatacccattcttcttattattgagggaagtatatcagtagaaaaaaagaaaaattgtgtatgcattgaagcaaaattacgaacagatgttggtataggtgtaggtatagggcttaaaattaaacaaaaatggtggcctattcttcctgatattgaatattctttaaaaactatgattgctggattaagtaatgaaaaaatacttaaaattgacaattgtaatggcaaaactttaacatcctatcgggaagaattattaggattttctcacagaattgatgcaggtattacactatcatcttatatacaagcatcttattctatcgattttaagataagttctggattaactttgaacgcaaaaccaatatatttaaccttagatgcaacgggatatattaagattgacgctactttaaaaattccatttatcatagatcaaaacgaagaacttgttaacaaatcttttaatgaaaatataaaaatatggtctaaataatgaacgaaatataattagttgcctgtattatgatttaccctgagtctcctttaactgtatatgaatattttgaattagtttatggatgtgtttttgtaatcctatttttaagaattcttgtttggttaaaaaaaaatactcttaatttttcatttaataacttcccttttccaattatcaaactcacaatttatttatttctgatctctggaataattggaattttgtcaacaatgtatcatggtataaatctattatgggaaaacttttcgaatgaacttttaatatcatatacagtattaattcttggttatctcattatagtcattgaatgtttcagaataacatatgtcttgaagaaaataaaaaataaatctgattctaattgaaataatcatgaaaaaaatcttttcagacttgttttataagaagctagtgtattataaagaatacaggaagagaattgaatcggaagattttccaatgatataatagtatcagaacaattgtatcaaagatgacaaaaaatcataaaaaatgtggattccctaaaaatccttaaatagaatgaccgtagctacttgtaactagcgtcgcaggatatgatcaacaaccgtaacgtgcttggcaccctgctatgggattctctggaaccggtggccacgcgccccctggccctcgtgcagggcgcttccctgtactgctacggcgtggacttcaacaagaatgtgacagaggtcttcgacgcacagggaacgatcgcggcggcttacgattactccccctatggaacagccacccgcaccggaagactcgtccagcccgtccagtggtccggcgagatgcacgacgaagaacccgccctggcctattacaattaccgcttttacaatcctgcagacggcaggtggattaaccgcgatccatggagagaagagaaatttttagaaatatatttgaagattgagttaagaaaaccgaatatctctttagaatcacccaatctgtatgttttttgttataattcccctgttatgtggtcagatgtattaggactctgggaaatagggccaaggccaccccaaataaatactgtagttactgatggtaaaggtggtttgaaagtctatctaggaggagctcccgaaggtagtgtagataggaaatgttgtctggattgcttaatgaaacatgaacaaagccatttgaatgacatacttgctgccaacctaagaatagcatttgatgaacaaggaaaaccttatccagcaggaagaggaattgtcagcccaactcatgggcgagaatacatagaatctgagataaaagcgcatggaatagaaattaagtgtttacgagaatctctcgcaaaaccgaaaatcagtaagacatgtagaaagaggataaatataagaattaattttttatctaaccgtttaaaagcattcgagaataaattaaaaatgattgcgattacaaaaattattttattatccatgatatttgttgtccctaaaatagaagcctctttagcattagttgacacaacaaaatccttagttctttctaaaaagagtccatacgtggagctagaaataatcgaaagagaaaatatatttgaattttacacggttgtaaaaccactgaataatggagataagataaattttcttgtttatcgttatgatgaggaatctcaaaaaattacgactatcatagatgtttcaagtaaacatgagatcgaaatatctttccttataaaaaaagatgatcttgaaaaattgacctattctgccacgaatactccgaaaggtacaggtggcataggatattttgaaaggaaaaataaaggagaacttggttttcttgatggtggtacagtatatattatcgaaaatatacatgattttcttaaaagagaataagtgttaaatgattatttgaccaaacctaaaccattctttaataatggatggaatatcttgtaagaaaaggagactataaataaaatcagaaatacttgtttttattcgaaattatccactttaatcttgtcctgcttcagttgtttgatttgccctcatctggtaattggataaaggagcatcataagcgtttaacattccaacttcatcatctgatggaggataatcgacacgacaaggctgttttatatagttccgtttttatttaatgtggtgtatcttttaatatttcatgttccttagtggatttaacagatagaagatgatgaccatccatgagaactatctgtaccatggtatctgcaagtagcggttttgaacatgctgaactcctggaatgtgcttcgctggctcctatgggatccctctggaacttagaggctacgtgtctcctggccctcgtgcagggcgcttccctgtactgctatggcgtgggcttcagcaaaaatgcggcggaggtcttcgatgggcagggagcaatgggagtggcctatgactactctccctatggaatagtcggcagcacaggtagtcttgtccagccggtgcagtggtccagcgaaatgaacgatccagaactctccctggtctattataactaccgttattacaatcctgcagacggcaggtggattagcagagatcttttggaagaaaaatcaagaattaatctttatgaatatggatctcctttaataatcgttgattacaacggtttattgtcaatatttggatataatatttctcttggaacgagcttttccgctcaaggatgcatgccaatacctgttgttccagggttatatgcttgtgtgggtggatcccttattctaaagagtggaaaatgttgtgacggtgaccgtttaaagagtacattagaatctgaactgaatttgaatgtaagtgtggaatttggatggggaatttccccacttagtatatctttcttaccgatggcggaaataccttttacttcttccgtgccatgtccacataatgcggatatgactgtagacggttatgtagagtttttcggtaccattcccggtgctgaggtgtcagcacgttattcaatttcttccgggacatggtctggtggaatatcatctagttggagtatcagtgtatcagtaggtgtaagagggggattttatggagccggagtatctgtatcatctgattattagtttaccatttaggtttgttccgaacaatccgtctagttctttcatctcaaaatattcataaatagtatttatttttataattattattgaaatatagtcgatagtgaataaaaaagcatcgtaagattgctttatacaatactgtaaaataattaaaatatataacttaccatttgcataaatcattatgaatttttcttttcatcctagatctccacagccactcatgaattatgttggacttgttttagtaattatcttattctcaagttgtctatttgtggttttaaaagaaattccaaagatatcaagatcttttaattctcaacaatttcctcagacaataggctctattattgaacttgaaggtgaaagtcgcccatccggatatggagccctaattttcctaataacaaaagccaaggttgcctttacatgggaagggaaaaaatatgagactagctatcctggcttgaactttgattataatctgtatcgtcaagcaaaggaaaagggatatttaaaagtatatgttaatgtttcagatccgaaccgctcagtacttagtccaggtgtaccttttcatgtgggattttttactggtatcgctgctttatttggttcggcgttgttaggagtatctttatatatgattaaaaaaatgttttttaacacatagaaaatgtatattgatcattgaaaatctttaagaataaatttaacaacattggtaattttaaagaggaattttttctatattagtatgaaattaaccagtatacccacattgaagaaagtgggaaaaagcccttcgttctataatacgacgcctcgggcaaccaaactctcatcaaaacatcaagggtatctggacggtcgtgtacaatgcagccaaccgtgcggtgagtttcaccaggcggtacggtggcacggtggtggaatgcggctacgactaccaggggcgccgctacatgaagaaaataacccaaaacgggacggtcatcagtcatgaatattacctgtaccgcggctacttgcaactagccgccctgaacatgctcaacagccggaacgtgcttcgcacgctgttatgggatcccctggaaccgatagcaacgcgccccatggccctggtgcagggcaatgccctgtactgctatggaacggacttcaacaagaatgtgtcggaagtcttcgacgcacagggaacgatcgcggcggcttacgattactccccctatggaacagccacccgcaccggaagactcgttcagcccgtccagtggtccggcgagatgcacgacgaagaactcgccctggtctattacaactaccgctattacaatcccgcagacggcaggtggatcaatcgcgatcccatcgctgaacagggaggattgaatctttatgcgttcctcggtaacagccctattgatagttttgatattaatgggagaagtactctacatggagctgctggacaagctatagttgctgcttttcgaactgggaacttaacttcactacgaaatcttgctaggctggggaaggaccaaagagtttgcgatgccttaaaaacacttgaatctacagctagaacactcatttcgaaatcaagaggaggtcgtgtcaatcgagaatttcctagtcagtattatgagaaggcgtatcatcaaatcattaaagaagcaaatgcaggtagcgcaacagcaaaaaaagcgttaaaacttatccgagatttaagatttagcaagtaattatatgaacgataataatcttaatatatttggacttttaatgattcttgatttacaagatataaaataccatttaattcgttttaatgctaacagtcttaccataataattatttttcccgaaaaaagaattgaaattgaatgtatgagcgataatagttttatcatatctgtattttccaaatatgagttttcaataaaaacaattgatgaaattttggaagaaattgaaataatgcaaagtcacaatttttaatggatatacgcaacatgaaaaaaatagaaaatatttttgatttattatcacagcttgattttttaggcattcattatcaaataggacgttttagtaatattagtataacagtccaacttgcttcccctggaaaaagaatcgaaattgaatgcatggatgaaggtcagtttgaaatatcggtttttgaaggagaagaaattactgatttatctattaatgacatattaaatgaaatatcataataaaaataatcacggctcttgcaaaaggtgatggagataaaaagctatggaattagaccgaaaaaactattttgtgtaattatgctgcagagtgcgcgagaaatagtctaggaaaataattcggcattatttactttagtcttgtttcgttgatctttcggagaaatttgctaaatatcaatagcagaatattccgaaaaccttgcgacaagacaattctacataattccgaaataatttaaatgaaattatgaaaacaaaagtaattattttaactattcttactttcttattagcaaatggtattgcatttgcagaaaaagaacaaaagaacatacgtcaagaattctcttttggagatgatcattgtgtgactagatttaatttttttgaaaactattcaactaattaatacagaaaaatttacacattccattattcaacttctcaatactgtgtatagttaaatggaatatttgatagcagaaggtgtaatgaccaaaaatataaattctccttctattccgtataaggatgaatctatcataaataattgggagaatgtaaaaaaacagtggaaggaaataaaaaataacgattattataaatcctctgatcttaaaaaattgtttgaaaggtatgattgtaatatgaatttaatttttaaagaaataccagttttcagcagcagtcatttcgacagctctttgcctggtaaatgctgaagaacagtgtcaagaaatctcgtgttgttcagaaagaaacaactgtaggttgaaagcccatgtgacttgttatgccagtcgagcctttatcccttttttaggatttccggaaggaggcgctgatattggttggaatatgttacttaatgattctcaatgcgattaatatacaacataatccatatcatgttaatttgcgggttggctccttggtttattggaattggatattccatatgtgtatctaattttcaccatgctctcatgtctggattttcgatgattatattttcatttccggtaacatttatattgactataatcagttggataatttggcgtgttttttgtgataaaataagtaaattcttatcttgtttttcagggatgattatcggacttataataggagccatgttaagctatatcttatgcgatgaacattattattttttgatattgtcaggaatggtagggttaatgataggacatattgaattttatttatttaattatataatggatgaatagtgaaaatatattaatataattatttaaattaagtttgttgtgcgaataaacaaaatattctcttcattatttaaaaataaaaagaagagtttttgttgctgaaggatgtagttattaattacggcagaaacgaaattactgtaaccgcccagtgaacttcaccagcaaagatggaaacacagcaatagaatgcagctacgactacatgggcagaaggcacatgaaaaaagtgccccaaaacggcacggtcgccagccacgaacggtacctgtaccgggggtatttgcagatagccgcccaggacacgctggacaaccggaacgtgctccgcacgctgttgtgggatcctctggaaccggtggccacccgccccctggccctcgcgcagggcacttccctgtactgctacggcgtggacttcaacaagaatgtgtcggaggtcttcgatagagagggagctgttgcggcggcttacgattactccccctatggaacagccacccgcaccggaagactcgtccagcccgtccagtggtccggcgagatgcacgacgaagaactcgccctggcctattacaattaccgctattacaaccccaaagacggcaggtggatcaaccgcgaccccatcgctgaagaagggggatggaatttgtacggtatgtgtgggaatgcttctattatatatgttgattatttaggtcttgaagttgaagatgatatttcttctggattttctggaccatttaaatgcgagagaaattttattcgcaaagaacttaaagcaggaaaagtacaaaataaattattaaataaaattggcatatatgattttaaaatacgtataattttgcagaataaaaaatgtgaaggatactgtaaaaagaacggaaataagggtttttctaaggcggtatcattatcatttcaaatggaaggagaagcaggttctgcatctttgaatatttttaatcttgcagaaatcagaatgggatggtatgggagattgggtgcgacaggaggaatatcagcaagttatagttcctgtagcaatgctgtttctggcggtggatgcgttaatggatatgcggaacttggattaattgccaaagctgcaagccgaataggttccttagaagttggtgctagaggaggtattaactttagaacttcaatttgtgtgactactaatttggataagtttcaagttaaagggaggggatgtatatccttgcgtgctcgtgtttgggctagtgcaaaaatttggcctcttgggaaaatagactataatcatgagtggcaagaccagtattgcaccccatggattcaattattgcaatgatcatagtgacttatgattaataatcaaaataaaaagaatattgactggagaaaactccaatttggatcgactttattaaacacaaaagaaaataaaagggttttatccttaatagataattctacatttgatacagtaggtgaacttcattactttataaaaacaggtaaaggtgaaggcaagataggagaaaataaaattaagatacttcaaattgatccaaatttctgctgtattaatactacagaacaagaatattgtatatatcggttaaataatgtaaaaattcgaatttcctataaagtaaatcaatatatcgatttttttcttcaggaagatttaaattgtagattcatacgaaaagcactagtatccgatgatagaaaccgtcaatttgaagtccctatttctaggaatcaaaccatattttattttttacgaatgattattggtttattatcgtttggccttttaaagcaaccaaaaacacctataattccactttcatttgacgctgattatgatatggaaaaagctcttgtatttggagttattgccatacagctgatttattgcccttttgattatgatgactggccataatacacagttagtaacggtagggttaaggtgtgactaggcattgatcaggacgtcaacgggcatctggacggtggtctacaacgcggccaaccgcgcggtgagcttcaccagccggaatggaaacacgattattgagtgcggctacgattaccagggacggcgctacgtgaagaaagtcacccaaaacggcacggtcgccagccacgaacggtacctgtaccgaggctatttgcagatagccgccctggatatgctggacaaccggaacgtgctccgcacgctgctgtgggaccctctggaaccggtggccacccgccccctggccctcgtgcagggcgcttccctgtactgctatggcgtggacttcaacaagaatgtcacagaggtcttcgacgcacagggaacgatcgcggcggcttacgactactccccctatggggccgtgaccggtacgggcagcctcggccagcccgtccagtggtccggcgagatgcacgacgaagaactcgccctggcctattacaattaccgcttttataatcctgcagacggcaggtggatcaaccgcgatcccatcgctgaacaggcaggatggaatctttatgcgttcgtagggaatagtttgaatattgaaatagatttattagggacagcttggtcgtcactgcaaacagaggcgggggccgcattggctgcacggcaagcggcagaagctgcggcaaaggcagcagccagagcagcaggaacagcaatcgctgctgaaagaagtaaaaggaataaaagatgtgcagaattatatcgcgaaaaatccgaggcaaaaaaaagaggctagaggtagttcctgtagggatatgataattcctgaatgtcctactcaaagcgagtgtaatgcttttaatgatcgatacgaaaaaatgaaaaggtttgccgaggctcgtaaagcttatgatgacgaatgtcatcaaggaggtgacaaaggacatcaggaacaaagtaaaggttggaatgaaggagcacagaattgcaaaaataagtatgatgaatgtattgctaaactaaataaattaatttaattgtaaatatgcaagcaaatttttataaagaaaagattgaagaattatacgatttatttcctatttcttctccaccctttcccagcaataatccgcatgatctacttattaattatgttgattctgaagaagaaatgcatgattatgctcgatctttattgggactcacttggacagagatcgattgtaaattttggtatgattgtggagactatttattttttgcgacgcccaagggattttcttattttcttccttctttaataaaatgtcgttatgaatggtttttagaccatgaaattactgttggaacagccatagattttgtcttttattgcatagtaggtaattttgacaatgacgcagagtttgaatatgcattaactcaagacgacaaaggatatttgctaaacagaatctatgaggtttttttgtcctataatattgatcaaattcttgcagtgaaacaatggatcacacaggaagaagcatccgatatgagattaagtaaaggtgcatttaatgcgactacatatcgccgtatttattatctaattaataatgtgttgaaagtaagatgaccagttctccgaaaatagattcacaaagaaagttaggtttattaacctaacaaaaaacaatgaaaaaatacagtatggagaaaatcctaaaaattctcagtgaaaaaaacagacggacaaacgatacgagaggatctgccgggaactcaacatcacggagtaaacctactaccgatagcgtagcaaatacgaaagaatggagttgaagaaagccttgataatgaaacagcctgaagaagaaaactaatgtttgaagtaaagcataaccaacaaccctggatatctcaatactgaaagaagtgaactcaaaaaatggtaagcccctcccggtgtctgcccctaaagtagaacgcctctctttactactacggcgtggacttcaacaagaatgtgacggaggtcttcaacgcacagggaacgatcgcggcggcttacgattactcccctatggacaggtggcttccacgggcagcctcggccagcccgtccagtggtccggcgagatgcacgacgaagaacccgtcctggcctattacaattaccgcttttacaaccccaaagacggcagatggatcaaccgcgaccccatcgctgaacagggggggttaaatttatactgctttttaatcaattatcctccatcaatagattatttgggaaaaattgcaatcgttctcgttattcctttaacaatcactgctgcggaagctacagcgtatgctgcaattgcagcagctggaatttgtttatcaaacagttactgtagcaaacttgcaacagcagcttttgttgctcctattcttgctgctgtcgctgcagctaaagccatttcttctacaatatgtagtataagatgtcgatttggaaatcatggagctcatcatagttttcgagccaataggataggcataccttcatcaataagatgttggaagcgtcatttgcaatcaaattgttggatttcaggtgcatcaggatcaaatttcggaactattagaataccttatggagattgttataaaaatagaaatggcaatcctccgggaagatggtctagagttataataacgtaccctttttgatcaatgaatattaattataaatttaaaaagcattatatatatatattaagagaatacaaaagaaaaacatataatgaattattaaaacatgaatacccaataactgatctcgtaactattgaaaaagatacattaagtatagaaataattcttcttgaaaaatatagagatcatctcctattagggttagacgttactttgcttggatcgaaaaaaatatgttgtaaaaattcaattagaagaacttttactgtatataataaataggtccaatacaatttaaaaaggaaatttctgaagaaaaaaagtaataaatagcattgttcaagagccaggaactggttaataaaggtagtctgcttctgtacctccttcatattttggtctcttgcttgcagtgtgtaagaggctcttcaaaattaccctgtttaccctgtgcgatatcattcaactcacacaaattcaatgtattgaatgacacaaagtaaaaaatgcgcaccctgtcttgccctgtatcccaccacgtagcggtccattttatcaccacaaaataaactgattaagaatatttccgcactctgttctaccctgtcacggaatgggcaatggtgtacacgttcctccgtccgcctccttcctttcgtacctgcacgcgatccggacacatctctgccagtttggataactttccgcccagtttagccgcgttcctggccagaagattgaatgctctcattttgtcagcaggaagattagctcttacacggtcataaatacccgtggaagtggcgtccttcctgtagatctgtttggcatcttccggagttccgcagcgtgcggcctggtcaatcagttccagtaactgcatttccgggctgatgcccagaacagccgtggctagtgtcttgttcatgtatgctctgcatcggtgacgtcccgtaggttcctgcaaatgctccggcgcccggtaatggtcaatgaaccacgccagagcgggcaactcccttgccagggcctcatccacggcatccttttcatcttccgtcccattcggaggcgcctcatgataaccgctcagccagaaagccgcatattttatctgtatcgcctccctccatcggaaaagccgtcaggctctctccggatccgtgttgagcaactgcaccaccgcccaggacaacgccatcgggaaggcatccttccctttgccctcaatggagaccactccggcatacaggatattcttgctccggctcatgacgttccaccgctccatctccttcacgttcttcatgatatcatccagaagaatcaccgggtaatgttccatgccgccgttaaacccttcacttcccggttttgtgaaatacttttcgccgggaaacatgccctcttccagtgtggccaggaggggagcgaccagctttttcaccagccaagttttgcccagatccttttccccggccatgaccagatgctgaaccctggtacgagccgtgcgccttttcaggcacgcctgaatacgctgtcttgccccctgcatccaggctataaaggaaggaaattggtcaaggtcctccgggtcatccagcaaaccacgcaagaaggccagggctgtcgagcaatccccttcctttccctctacccacggcccggacggctcggaaatcgccgtctgaaataacggggaagcccgcttcaataatatccacgcccagcgtttccagctgcatggccacctgtattttctgctccacgttcatcgccgcgccggggcactgttccccgtctctcagcgtcgtatcaaaaatatgtatttgttctttcatttacagtaaaaatgttaagaggtcgttccttcgggaactgcgcacggaaaacgttcctgttacggaatcattcctttggcgcaaatcaagacagccgtttacttccctcgcgccggaacggttcaccggcgcatatcgagatatcttcacggacttaccgtccgagaagcagcaatagacgaccttgcagaaacagggtattcatcttgcttgtttttactataaatccaccctgaatggggaacgggacagacaatgctctttagaacctgctctgccaagacacctcaagtacatatgacattgttagagccgtctcatccattgaaattttgaaagagagcgccttccttcacaaaaaaactgcctgttaaacaaggttatactgtacggataaacatagaattcccataactggaactcattcctgaaatcagttccagatgagaaaattatgtaaacccaaactggataacaagcctaataacaatctattaagattaccataggataaggtttgacacattattcacaactcaacggcctattgctattcacagcaataggccgttttctacatttcccggtgggaacgtatttcctgaatggaaatggacagggaggcgcggccgcgatacacgttgcggtcaatcgtgaaagcgatatcccagggaggattgggaagctcccgttccgctccgttgaagaaaatagcgtcacgctccacgatgccctggcgcatgaaaagcttcagatgattggttcccacgcgcttgggcggttccgtgggaaaaacgtcggaactcatgaagagaggctgtggattggagttgccgaaaggttccagcttttcatagctgtccagcaaatccagcgtcaacgcctggaaggacacttccatgtctatgttgagcacggggctgcgctgttcctccgtcgtggtttcagacacataacggttgaatgcccggcggaaatcgtccatgcgggattcttcaatcaccagccccgccgccatgtcatggccgccgccggaaaccagcgtatccgcgcaatggtggatggcctgcaccagggacacgccgggaatggaacggccggagcccttccccactccgctttcgtcaaaggcgatgacgaaggtcggcttgtggtaccgcctcatcagctgggaggctacaatgcccaccacgccgggatgccacgcgcgggaacccagtacaatgacgttgtccctctccgggtcaaaggagttatgaagcatttccaccgcatccgtccggatggcctcctcttcctcctgccgcttgcggttgtgggaatccagcatttgggcaagctgcacggccctcctggcatccatggtcagcaggagttccaacgcatccatgggggaatccatgcgcccggcggcattgatgcgcgggcctatcctgaaccccacgtgggcggcgttcaggaagcccgcgtggttgacggagtcggaaggtcggatgcccgctatttccgtcagggttttgaggcccgtatggcggctgtgcgccagtctgcccaggccgtggcgaaccagaatcctgttttccgccaccaggggaacaatgtccgccacggttgccacggccaccaggtccagataaagtttcaggtcaaaggttttcagtttccgctccttcaggagggcatgcgccagcttgaagactacgcccgcgctgcacaggtaagtatatgggctgttttcctcaattttggcattgaccaccgccgccgcatccggacgccccaaagggcccgcctcatggtggtccagaatgatgacgtctatccccagactgttaagcatgtccacctccttcacggaggaagtgccgcagtccaccgtaataagcaggctgggagggtccgcacattcgcaaaggcagcgcttgatgccggcctcgctgagtccgtagccttcccgggaacggacgggaataaaatactggggatccaggtcataagccatcaaaatggcccggagaagcgccacggaggtgacaccgtccacatcatagtccccataaatgcacacggtttccccttcatccacggcccggaaaatgcggtccacggcatccctcatttcccccatcaggaaagggtcgctcaggtgggagagcctggggtccagaaagagttccgtttccattcccccgatgaagccgcgctgcagcaggagctgcttgaccagcaggggcagttccgcaggaaacgctttcaagaccggatcatcctccttcacggaagggcgtagagtccaatgaaaacccggcgtcatggcagtattttagccccgcatccaacagggtcaaggttgtttccgcaacagaaggccaaagcggagaaaagaagcgtccgcttccgtttccggaaacagtctgcacgccgcgcgcccggccctttcaaaaaaaactccgcccggttcgttccggacggagttcggcgtaaggcgccagcgcctgagacggttatttcctggaggaaaaaatcacttcattaatgattgcatccggctggggagccttgtaggtcaggcgcacggcggaagttccggcaggaatggcaaattcggagaccccgggaccggcgtttctcttgccgaccggcgtccaggcaccctcgccgcggcgcgcctggatggcgaaggcggcggatcccactacgactaccttggaagccctggggttgtccagattgggaacgactacgtccaacggcttatcggcacggtaaaccgttttcaggtttctgtcgctcagggagaccaggctggtgccaggatcagaaggaggaacgtcaaatttgaacatgttcagaacaatgtcctgttccttcccgcttttattgaccagtttcatgcctctgattcccttgggaagctgatttcccctggcaatgaagttcttgccctgtttgtccagcttctgaaccacgggtttggaggaaccttccacatccagcactacctcagcccaggagttgacgtcatcccgttccaggttgacttccagccaggtggcgtccgtggggccatccaaccgcagggaaataaattctccgggtttcatcttgtgcgtttccattacgcggttgattcgcacgattttgtcggatttctgcacggaaacgccctccagcccagccacgttggaggaagccatagcggaaggaggcgtgttgacggctatttccctcacggcagtccaaacggcccgtccgttgcccgttttcttcggctcaatgacgcggtagcgcacggcacggagcaaaaccggcttgggagccttccaggctacctgcattccggaggtctctggccccagcggcttccaggtcttgaggtcgcgggagccttccagctgccctttctctacatagtcgccgtccttgtcgttgcggcccatcagcacttccacgctccgcacgggaatgggcattccgtagtccacgccataccagtctcccggctgaccgtaggcgccggagtgccagaaggagccgcggtccccgtcacagaagagttccgccttatccatgctgccccccttgaccagaggcttgggggaaagagccggagcgccggcaatggccgggaaaacttttttggagacaatatccgccagttcattgacggcgggggccatcacccgggaaccggtctttaccgcggaacggtacagctgcccttcctggttatggcggcgggaaatgccatccatggccgccaaagcctgcgtggcctgcaccaggtgggttgtggcctctccggcgttgttttcctccagcgccgccacggcatgctggccggcacgccccagttgttcaaaggcgtccacccacgcgccgatttccttcatcaggcggggattgtcagccttggcgcggatgacaggcgcagcggaagccatgcgagcgaattcctttttaagcagagccgcatcagccttctctatcctgccttcccgggcggcttccagcacgcgcttgaccacaggttctatttccacggattcctcacgccggtaaccgtggccgttaggcccctggtcggaattgtggttcacaaaaacctgcatggcttccgccgccttcgggaacaggcgcctgactccctccttccaggattcctccgacttaaagccgttgatattccaggagtagtccgcaagaccgaagagggaaaccttggaggcctccggcttatccatggggttggagacgaatccgcccatggattccctggcccccggttccgtggcaagtccgtacacgcggcccatgcacaggttggaacggcagtagtccgtaacggggaaattccaccagacgtaggaagggcgcttgattctcctgttcacccactgctggccttccagcgtgatgtcatggcagacggaattccccgtccacataacgtggatggaggggtccaggcggtcgcccagaatatccagataagttcccggcttgggattggcccagccgcggttgtactccgtagggcacatgaccaggggagtgacgtctttcttcaccttgacaaattcgtcattgatcttgttcagcagaagggcctgcatgtccccccgcttgccctctccgaagatgtcgtcaaaaaacacggcaaaggaacggacgcccagcttgtacatcatctcaaactttttgatgacgttgttcatgtcttcttccgtccacttaatgtctttgccggggtggatggcccagacaaagtccacatggttttccttcgccaccttcaccagttccctgatctgggcggcctggtccgcgggatagggatcccgccagtggggggaggaatggtagggatcgtccttcggcccgtagatgtatgtgttcattttgttctgcccgtaaaagcgcagctggctcagacgggcttcatggctccagggagtgccgtaaaaaccttccaccgttccgcggaattcaatgtccggccaatccgtaatttccccaacgggcaaaatcacgccttctccgccggtcttcgttcccagctgccgcagcgtctgcatggcgtaaaatgccccccgttcgtcatgggctcctatgcccacctttccctgcggagaaatcaccagcttgtaggctccggatttttccggaaccccgtccagcagcttgctcccgcccgccttggcggaacgtattgtcacggaaggcttcccggagaaagcaaccgtctgggaggtgaatttggactgctggggggacggatatacggcaggagtcgccgccagagcggaaccggccagaaatgccgccacgctcaagccacattggagaagttgaaaaccattcatgatgatgcgcgataatggaaccagaaaaaactttccacctcaagaaaaaaccgttctcctccatcaggctgtcgccaccacgggaaaagacttcaaaaagaaacttccccgccttctcttccctcttcaggaagatctccccgctcctcatggaatattcgggaactgtcatcactccatcacctggctcatccagagaccgcccggcgcagccgcatccctgcaggaagcggcatgttgatggatttcctgtcaagggcaatcgtcccgcacggaaatcctggcggggctggatgccaggggagccgccttctcccttcttgaccaaaaattcaccgtaacgctgaaaaacaaaaaagggccgtgcagaatccccgaaaagtcagcgtcatctcatttcagaagacaaatttgaccattgcatcacttgaagggaaggttcatcatgcggaacatgctccggcgcattttgattccttttctgtgtcttctgggcctgttctgctctcttcaggcccaggatgccccagtattgaaaatcgcggctctgcaccccgtcttgggagacatggcccgcgccatcggcggcagccgcgtgcaggtggcggacctgctgcgccccaacggcaacctgcacagctttgaaccctcgccgcaggacattgccgccgcaggacgggcgcgcctggtgctggcctccggcaaaaacctggagccgtaccttcccaaattaaaggacgccctgggaggcagcgcgcaaattctggatctcggagcctccgtcccggatgttcccgtggaggaagacaccgcagaccatgaccacgaacacgacggagactgctgcgcccacggtcccaacgatccccactggtggcacaccccggccaatatgaaacgcgccgcccgcaccctggccgcaacgctcacgcggctggacccggcccatgaacaggactataaagccggcctgtcccggtggaacagaaagatggaccagctttcctcctgggccagaaaggaacttgcggacattccggaaacggaccgcgtcctggttacggggcatgcggccatgaaccatttctgcagggaattcggcttccgcagcatcagcatccaggggataagccgtgaagatgaaggcaactccgcccagctggcctccacgctgaaaaagctgaggtcagccggggtaaaagccctgttcccggaatattcctccaaccccaagagccttacggaaatcgccaaatccctgaacatccccgttgccagaccaatcaataccgacgggctggcccctgagggccacacgttcgaatccatgttcaaacaaaacacaggcatcatcaaggaagccctttccccgtcccccaggccatgaccagcacacccctgcggcagttttttcccactctgggagtcgtcatcctgctgggattcttcctctacaacatgacggcacccaccaccggatcacaggaagcggagcattccgcccccacggcgcaaaccgcggatgttcccacggtcatcacggtcagatgcgcccaccgtccggaagccctttccatctcctgcggcggccgtcttctctggcagcccgaaacgcccgggctgcacgaagaaacggaatgcggcctgccgttgaacaacggttccgtaacgcttaccgtttccgcccgctggccggaaaacacgccggacacccccgtcacgctggaactggaaccggaggggaaaaccaccgtctccgccacccgctggtccttcggcccctccctgaacgacagctactccttctcatggaaatgaacagcccagcccctccctgcacccaggaccacatctgctggggcgcgcacgccagccacccggaccgtcaccgactggaagtggacagcctcagcgtttattatggaagccttctcgcgctcaacggcatcagcttttccatcacctgcggccacacgctggctctgatgggtcccaacggtgcaggaaaatccacgctgatcaaggctctggccgggctgatccgccccgattccgggaaaatcctgtggaacggatgccccctgcacgacacgccgggagaaatagcctacctgccccagcgttccgacgtagactggtctttccccatcaccgtccgcgcgctggtggaaatgggccgctatccgtccctgggcctgtggaaaaaattcgggaggcatgaccgggatattgtggaaaaatcccttcacgttcttggtatggaatccctggcggaccgccagatttcagaactctccggcggccagcagcagcgggcctttctggctcgggccctggcgcaggaggcccatgtcctcctgctggacgaacccttcacgggcctggacgcccccgccagccaatccctggggaggcttctggattccctggcggcggaagggcggctggtcatcgcctcccaccacgacctgaacacggcggcagacatcttcgacaccatcctgctgatgaacagggagctggccgccttcggccccccgaaggaagtgcttacccccgcacgcatccgggagacatacggaatggaacctcaaccggaaatccaagcttcatgatggatgattttctccaattcctccgcgaacccatcgctcagcggtccctgctggcctgcgtcatgattggcttcgccaacggtttcgtcagcgggctggttatcctgaaaaaatccgcccttcaaatcggcacgctctcctgtgccctgttgccgggcattgcggtggcggtgctcctcttcggccttacccgctggagtttgctgacgggggcggtggtggccgccctgctggtgggcctggggtccctcttcgtttcccgcacatcccggctgaaccaggatacagccctctccatcctgcataccacggccttcgctgcgggcttcatcgtgctggtaaggctgggcctgcaacagaaaattgacgactggctgttcggctccatcatgagcctgtccgactccgacctgtggatcgccttcgccatcagctccgtcagcgtcctgatcctgctgctcttccgccgccccatcctggtctgcctttttgacccggacatcgccactacgctgggaatcccctcccgcctcatcagttacggcatcttcaccctgatcattctggtgctcgtttcctctctgcaggccgtgggagcgttcctgacgctggggctgcttgtcggtcccgccgccacggtgtacctgcttaccaacaagccgtcccatctcttctgggggggaggaatcatcggaggactgggctccctgctggctttttacctgtccttccccctgggctggcatctgggtgcaaccatcattctggtgctgggcattattttttgcacagcctatttgtattcatcacggtgcgggcttttaaaacagcacggaaagaattcgtccaaagtacaataacaaagcccgttttcatgacaatccatgacacgcagactactagtccgccacagggagcgccattataatgcgggttgtgaaaaaatgtgagatatgctctgcaccggcaacggtgttcctgacacagatcatcaacgggaagtccaccaaattctgcctttgcgccaaatgcgcccaggagcggggtctgctggacccggatgcctttgatctggcggagaaactgttcccgaaccttcagggccaattcggcaaggaaggcgcggcggggcccgccgcgcccattccggccctgcaatccctgcccctcacaagctgtccgatctgctccttcacccttcaggattacaaaaacgtaggacgcctgggctgcagtgaatgctacaacgtctttgaagaagaaatcctccctcttcttacccagatccagcctgattcccaccatcacgggaaaacgccggaacgggccgaaaaacgcgaaacggaaacccataccatcagcgatctggaacaacagctttccctggcagtggcaagagaggattatgaacgcgccgccaaactccgcgatcaaatcaaacaattgcgcacgccgaccaattaacatacatgctctttgacgacttactcaacaaccccgccaaatggatggtggaatcaagggatgagcacgacatcgtcctcacctcccgcatccgcctggcgcgcaacctgaccgccaccccctttcccggctgggccacacgccagcagagggaggaaacgctgaagctcacttccggagaagcgcgccaaatccccgtcatgaagggaggctattatgcggagctctccggacttacccagcagcagaaacagttgctggtggaacgccacctcatttcccgggaactggcggcgcgttcggaaggctgcgccgtcctcatctcccgcagccagaatgccagcatcctctttaatgaggaagaccatctgcgcctgcagtatatcctgcccggcatccagcttaaaaaagcatggggggccatctccaaaatagactccgaactggaggccaggctcccgtacgcctacaatacgcggctgggctacattaccgcctgtcccaccaacctgggcacgggcatgagggcctccgtgatgatgcatctgccgggcctcgtcatctccgaacagatgcagcaggtcgttcaggcggccgcgcagctcaacattaccgttcgcggcctttacggggaagggacggaagccaccggcaaccttttccagatatccaaccagtccacgctgggggacagtgaagaccagattgtggaacgcatgacccgcttcacctccgacctggcccatcaggaatggaacgcgcgcaggcggctgctccagtcatcttccctgcaggtgaaggaccgcgtttcccgcgcctacggccttctgaccaacgccactctgctttccacgcaggaggcgctggccctgctctccttcctccggatgggagcgtctctggacatcttttcccaccaggcattaaaaaacgtcaataaaaccatcatgaacatccagccggcccatctggcccgcctgtccaccacggaccaaaccactccggaacacagggaccagatccgcgctgatattattcggaaagaactttccggcaactaatgcaaccatacaaatttttttgaccatccatgaataattttacgcctagggcgcaacaagtgctggcgcatgcgcgccgggaagcggaccgcttcaatcatcattacataggaaccgaacaccttctgctcggcctgctcaagctgggcaagggcgtggccgtcaccatcctggaaaatctgggtgtggagcttaccgccgtgcgcaaacaggtggaggaacaaataggccggggcacggaaccccaggcggagggcaacatcccgtacacccccagggtgcgcaaagtcctggcaatggcaaacagggaagcccaggaactcaaccacacgtatgtgggcacggaacacctgctcctgggcctcatccgtgacggcgacggcgtggccggacagattctgcgccacttcggcgtggatttggaacaggcgcggcgcgaactgctggacgtgctgacccccaaataccagatggatgcggatgaagacaacatcatcccggacgacgatgacgacgaggaggaaaatgaatcccccgccatcccgacggacgagccttcctccccctcctactccaggcagcagaaatccaagacccccgcgctccaggcctttggccgggacatgacccagctggcccgggacggcaagctggatcccgtcatcggccgcgcctcggaaattgagcgcgtcatccagattctgtgccggaggaacaaaaacaaccccgtcctgctcggtgaagccggggtgggcaaaaccgccatcgtggaagggctggcccaggaaatagcccagggccatgttccggagctcctgcgcagcaagagggtcatctccctggacctggcgctgatggtggccggcaccaaataccgcggccagtttgaggaacggctcaaggccgtaatggatgaaatacgccgggaaggcaatgtcatccttttcattgatgaactgcacaccattgtaggcgccggctccgcggaaggctccatggacgcctccaacatcatcaagcccgccctctcccggggtgagctccaggccataggcgccaccacgctcaacgaatacaggaaacacattgagaaggacgccgcactggaacgccgcttccagcaggtgcaggtaggggaaccctccgtggaggacaccatccagattcttgccggcatccagcccaagtatgaggaacatcacaaggtgcattatacgaaggaagccgttgaagccgcagccaagctctcccaccgctatttgacgggccggttcctgccggacaaggccattgacatcctggatgaagcgggcgcgcgcaagcgcgtctcccagatgacccgcccggaccacatcagcaacatggaaatccgcattgcggaaatcaaggaacgcaaggacaaggctgtggaaacccagctttttgaagaagcagcccgcctgcgcgacgaggaaaaacaagccaaggcggaacttcagaacatgctggaaacctggcgcaactcctatgagaccaactacgttcccgtgacggatgaagacgtgatgagcgtactcgccaaatggacgggcatcccgctggcccggatggaggaaaaggaaaccaccaagcttctgcggatggaggaagagttgaaaagcaaagtcatcggccaggacgaggcggcttccgccatcgcccgcgctctgcggcgcagccgtgcggatatcaaggatccgcgccgcccgatcggctcattcctcttcctgggccccaccggcgtgggcaaaacctatctggcccgcaatctggcggaaatcatgttcggtacctcggacgccctgattcaggtggacatgagcgagtacatggaaaaacacaccacgtcccgtctcatcggttctcctcccggctacgtaggccatgacgaaggcggacagctcacggaagccgtccggcgcaggccctactccgtcatcctctttgatgaagtggaaaaggcccatccggacgtcatgaacctgcttctccagattttggaagaaggcagcgtaacagactcgctgggacgcaagatcaacttccgcaacaccatcatcatcctgacctccaatgtgggggccgcttccgccaaacggcagagcaccatgggcttcggcgccatggccgccgacaacgcggactacgccgccatgaaggaaaagattctggaagtggcgcgcaagcaattccggccggaattcctgaaccgcttcgatgacatttctgtcttccgcatgctggaacgggacgacctggaacgcatcgtgcatctggaagcggacaagctcatctcccgtctcaagaccaagaatatcacgcttgccctgagccaggaagctctgagcctgatcatcaagaacggctatgacccgcagtacggcgcacgcccgatgcgccgcgccatcgaacgcctgctggaagacccgctggcggaatccctgctgaggggagacgtgaaacccggcgataaaattgaagccgtggaaacggacgggacggagacgctcaccttcctgcacatccaggacacccccccggcaaagcccaaagcgccgcgcaagagaacgccgcggaagcccaaggtggaataaaagctttcaggcttttcaaccagggcccctgcatgacaacatgcaggggcctttttctttaacggattacgcaaatatccgctttttcctgaaagaactatttacctgtcttgtatatattacaatatgacctcttatttcccaaaaattctattacttttcgtgctgacaagcctgtttgtcttcgcagaagatatacagaaaaacagagagcgggaagcagcgcgttcagtaatcatgcggaccgttccgtccctggccaaagccccggaaaaactgcaactggaaattattgaaaaagaagacgggcacgatgtttttgaaacgaaagcctccggcggaatactgaatatccggggaagcagcggcacagccctctgccggggattctatgattttctgaagacaaaccgtctgggaatggtttcctgggataataaagatatccgctggccggcgcaactgccggatgccgcgccgcgccgcatcgtttcccctttccgcaaccactattacttcaatgtggtcacctatggctatacgatgccttactggacctgggaacgctgggaaaaagaaatagattggatggcgctgcacggcatagatatgcctctggccctggttgccacggagggaatcgccgtccgggtatggaaacagctgggactgacggagaaagaaatagaagaattttatacgggaccggcacaccttccctggcagcggatggggaacatcgtcaatcatgacggccccctgcccgccagctggcacaaggaacaaatcgccctgcagcaccgcatcctgcacaggatgaaatccctgggcatgacccccatttgtcccgctttttccggttttgttccccggggaatcctccgcctttatccggaagcgaagcttcaccggctggggtggggaggctggcctcaaaaaaaccacgcccattttctttctccggaagagccccttttccttaaaataggacgcctgtacatgcaggaatggcagaaggaattcgggaaaaacacctattttcttgcggactccttcaatgaaatggaacttcccgaaaacaaaggaggcgccgaagcccgcaacaatatgctcagctccctcggggaacaaatctaccgctccatttcctccaccaacccggatgcggtatgggtcatgcagggatggatgttcggataccagcgcaatatctggaacgcagatactctgaaggctttgctcagcaaggttccggacgataagatgctccttctggacctggcggcggattacaacaagactttctggcgcaacggcatgaactgggacgtcttcaaggggtttttcaataaaccgtgggtttacagcgtggttcccaacatgggcggcaaatgcgccatgaccggggtaatggatttttacgccaacggccatctggaagccttgaactcttcatccagggggcgcctctccggaatgggcatggccccggaagggatagaaaataacgatgtgatctacgaactggttacggacgccgcatggagggaccgccaggaggacgtggaacaatatctggaaaattattgccgtgcccgatacggaaattatccggacagcatgaaggaagcctggaatctgttccgccgcacagcctattccaacttaaaggaccatccccgtttcaactggcaaatgaaacccggcacccgcggctgttccgtaaacacaagcgaagattttctgaaaggcctctccctgttcgtcaacactcgcggcctggaacactcccccctgttccgacaggatgccgttgagatgaccgcccattaccttggcatacgcatgaatgaagccatcctggccgctctggaagccctggatgaacaagacatggagaatacgaaaaaatgcatggaatatttccgcaaatacgcccttcgggcggattcccttctggaagggcaccccacctggaggctgtcgcgctggttatcatttgcccggtctcacggaacttctccggaggaaaaaaacaagtatgaacaaaatgccagaaggctggtgaccagatgggggcctcccgtagacgactacgccgccaaaatatggagcggccttatcagggactactatctgccgcgctgggaacactttattcagagccgtctttccgaaaaaaatccggatatgggagcatgggaggaaaaatgggttcgttccactggcgtaagcgcggcgcacgctcccggagatctggtcaacgcctgccgccaggctatccgggaggcgccgcccctgccttcttccctgaaaagaaaagtaaccgggtcaattataggaaactggacctccgcaacggtatccacggaatggagttatttggactggcccgtttcttccgctgatcttgaaaaactccggggggtgcgcttcgtcttcacttccggcagccatgctctggaaatagacggcgtcgaactcctggaaaacggcaaagtaatcgaccgcgaccggcacgccgggttggcaggcaagccttcccgcgggaatttctacaaactttcccttcccaagggaatccatgccaacaacggatgttccctcagagccagggtccgctccgtgggcggaaaatcctccaatgggaaattggaactggttaaagaatgaacagcttcaatttcatttgcttacggcttattcctcattgattccgtgccttttacgttagaaaactccgccgtccgaaccagaaggcggcatggccggcgcctcccggaatctccgttcggcccaaccgggccgaaagctacatttcaaaccggtgcaggttttccacatgggaatatcccatcttcctgagcacttccagcgccttgtccgccctcttgcccgtacggcaatacagcaaaatcacggcattcttatccggaagaagctgcgcggcccgttgttccacctcatctgccggaatattcaaggccccctccttatgtcccgtgcggtactcctccggagttcggacatccaccagcacaatagggcgcgccatgccgctttccggagacaccaccatggcggcgggagcaggggcgcgttccgtattcctgcttttcagccagacgaagagggcagtcagcccggtcaccatgaccacgtacaaaaccacatttttcacgcggccacttcactaaaccgcggcgaagtaatcaagagaaaataacgcccagcccccgcacgcaggcgtcatctgccgtccggtccgctccggaggccccgttccacgggaaaataacgctccgtccgcagaagcgggaagggaaagaactttcccttccccaccatattcggaaaggccggagaattgtctccctacccctcatcatcaatcaccacagcctgggaggcgaaaccaaaagcggggcttccccattccacgacatccccgggtttcaaatataccggaggcttcatccccatccccacgcctcccggagtgccggtggaaaccacatctccgggccataaggtcatgaaccgggaaacataggcaatcaggcgcggaacaggccagatcaagccgtccgtattgccgttctggcgcacttccccgttcaccttcaattccaggggaatgccggcaccgtccccaagttcatcagcggaaatgaacgtggggcccattggggcaaagctgtcataactctttcccttggtccactgtccgccatgttccagctggttggccctttccgaatagtcgcacatcagcgtatagccgctgatagcccgcgcggcctcctccggggaagcgtttttcagcatctccttaatcactacggctaattcaatctcataatccagcttgtcgcagccgggcggatacaaaacgacatcgctgcaggaagtaatggcggaaggcgatttcaggaaaacagccggctcctgcacggaatccccgtcaaactccttcgcatggtccgcataactctttcccaggcacaccagcttggaaggagaacagggcagcgcggtatcaatcatccattcagggttgacagctttggcggcggcactatccagaaacgcggcaatgcgcttcatttcctctccacaggcccccgtttccccgcaaatgcaggcatccacatcggcaagcacggagtccgccgccaggtattctccgcggctttcgctccacagagccatgacgcgctccgcccggtcattcaggtaaaatctgatcttcacccttccatcctacaaagctcctccttttaggcaaagggcggttccgtcattcttcgctccggcggttctcttccgccgcccggacgctctgtgaaagcatgcagcgcgtagggcttgcgttaccggagcgaaacattatcatgccaccgcttaacatcattaacctatgtccgatcaaatctacttttttgacactaccctgcgcgatggagaacaatgccccggagcatccatgaacctacgcgaaaagctggaagtggcgcggcaaatggaacggctgggcatggacgtgattgaagccggctttccctgcatctccgacggcgactttgaagccgtgcacaccatcgcccgcgaaatcaaaaaatgccgcatcgcaggactggcccgctgcgtgaaggcggatattgaagcggcggccaaggccctggaacccgccggggaacgcgcccgcatccacatcttcctggcaaccagcaagctgcacatgcagttcaaattgaaaaaagcggaatccgaaatcctgcgcatggcggcggaaggcgtatcctatgccaggcaattcgtacaggacgtggaattttccccggaggacgcttcccgcacagacctggattttctgaccaaagtcgtggaaacagtcatcgacgccggcgccactaccgtcaacattccggataccgtgggctacaccacaccggacgagttctaccgcatcatccgccacctgaaggaaaatgtgccgaacatcggcaaagccgtcatctccgtgcattgccacaatgaccttggcctggccgtagccaactccctggcagccgtccgcgccggagcccgccaggtggaaggaaccattaacggcatcggcgaacgcgccggaaacgtggctctggaagaggtcatcatggccctgcgcacccgcgccggacaattcggagacgtcacggacaacatcaacacgaaggaaatagtccgcacttcccgcatcgtggcccgcatgagcggcatgcaggtgcagcggtccaaagccatcgtgggggaaaacgctttcgcccattcttcaggcatccaccagcacggcatcctcaactgccgggagacctatgaagtcatggacccgcaggcggtcggctggggagccacggaactcccgctcaccaagcattccggacgcgctgccgtcaaatccaggctggaacagctgggccatgtcctcacggaagaggaagtcaacaccgtctttgaacgcttcaagaaagtgggcgactccaaaaaattcgtttatgatgatgatctttccgccattgtggacgactccctgcatgcctccaccggcctatgggaactggacttcctgcaattcgtggcaggcagccacgcgcggcccacggctacggtgggactgctcaaggaaggcaagaaatttgaagacagctccacgggcaatggcgccgtggacgccgttatcaaagccattgagcgcatcaccaggcgcaaaggcacgctgaaaggctacagcgtcaacgccgcttccgaagggaaggacgctctgggagaagtaacagtgcatgtggacttcggccagcccaagcccattgtgggcaagggagcctccacagatgtcattgaagcttccgcccgggcctacctgaacgcggtcaaccgttctatccgcatggaaaacatgccccagcccaataatctggatgcaggaaccatctaacacgggaagcgccccgtttgcccgaacggggcgcaactccgcccatcagcctgccagcctctgcggggcttgcttttccattgctcccatgccataaggttcaagactcttacaccaccccatgaaagcgacattactccttctttgcctggcgtgcagcgcgctggccgcaccgccgacaaaaaaacagccggcccccgttgaaccgctgcccgccctggaaaaaaacaccattgccattgacggccatccggaaagcgttgcagcggatgccgagggcaatatctatttcacctgcatcggctccaggctcacgcctacggaaaaagacaaggacggctacctgggcgtcattccgcacggttccacagagccgaaaaaaatcacggacgtagataccctggacgcgccgaaggggttgctgtatcaggacggcttcctttactgcacggacgtggacatggtattcaaaataaacgccaagaccggcgctattgaaggatacgtggacttgtccccatcccgcatgaaattcctcaatgacctggcgttcatcaatggcaggctcatggtttcctccacggataccaaccagatcttctatgtggacacgaataccagctcttatggggaactggtcaccaaacaacccatctacaagccgaacggcctggcctgggacccggaaagaaaggtcatttacctctgcgaatacgcaacggatgaaaaaggcaaacccagcggacgcctactctccattaaccccgtttcccgggaagttacggaactttccaaggaacggggacagtatgacggactggtttaccgtgacaacgccctttactacagtgactggtccaaggataaaaaaccggaagctgtccgcaggctggatctgaagacggggcgttccgccccggtagccaccggccctgttgagggggcggcggactttatcctgtatgactccatgatggtggttccgggcatgacggaaaagaaaatccacatcatgcccattggcggaaaaaaataaacacggctgttccgtttttattccccttatccgggccgccggcggcattccccgcgctggcggcctttttcaatttacggcttgaagtacacctggggatgcgcttagttaatggagatatgaacacgatttccgaccaaatcatggaggggatgaaaaccgccatgaaagcaaaagactccgttaccctcaataccctgcgcgccctcaagacggctctcacgaacacggccatcgccaagggaggcttgggaacccggctggaagaagcggaagaactggccgtggtccgcaagcaaatcaagcagcgcgaggactctgcggaacaattccgcgccgccggacgcccggaattggcggaaaaggaagaggcagaaatcaccgttctcaagcaattcatgcctgcggaactcacagcagaagaaacggcggccattctggaaaccgtgatgaaggaaacgggagcctctaccaaaaaagatatggggcaggtcatgaaactcatgcaggaacgcactgccggcagagtcaacggcaaggagttggcccgcatggtgtcagccagactgtcatgaaatgctgcgccgccatcatcgttgcggccgggtcctcccggcgtgccggatttgacaagctgctggcccccctgcacggcgtcagggtgctggaacgcagcatccgcgcctttgccaactgccgggaaatcacggaaatcgtagtcgtttgcccggaggaacgttttcatgccattaacggcgcaaacctggaaacggaaatacccgttacccgtgtggacggaggggcggaacggcatgaatccgtgcagaacggactggcagccctgctttataccccggaattcgtggccgtgcatgatggagcccgcccgctcattacggtggagcaaatctcccgctgcattcaaaccgccagggaatatggggcgtccgcttccgcacatcccgtaacggacaccctgaagcgtgcggacaaagaacgctttacgcttccggaacaggtggaacgggacgggctgtggtgcatggaaaccccgcaggtctttcaatatcctcttctcctggacgcctatgtggaagtcacggaacggaatattcaggtaacggatgaagtaaccgccctgcagctcatcggccatcctacgcgcctggtgcataatcatgagcccaatcccaaaatcacatggccggaagatatttcccgcgctgaaatgctaatggaactcaagcacctccgcaatgactcatgaccggccttctgtgtaagaatccccgcatcgttctcattctgggaacagggtatctgggaaaagccctagcggaaagcctgcggaaagcgggacatacggccctgacggcggatattgacccgcaaaaagccatttacgaagcagacgttgcagaccaggcctccatgcaggggctggccgcccgcatcccctccccccagatcatcgtcatgtgcgccagcacgaggggaggcggagaggaagcctaccgcaacctttacgctcatggaacgcggaacacgctggaagccttttccggaacgccggtcatcttctgttccagcacagccgtctatggaatcacggacggacgctggattacggaggaacacaacgtctatccctcctccggaaaaaacgggctgcttattcaggcggaacaggcggttctggcagcggggggcacggtcgtccggctgggagccctgtacgggccgggccgctgtgctctcgcctcccagtacgtcacgaaggggaaggccctccccggagccatggacagatggctcaattacatccaccgggacgatgccgcagccgccctgcacctgctctgcaccctgcgggaaccgcctgccggcatttacaacctgacggaccgcacccccatgcaaatgggagaaatatactcctacctttccaatttgctggggaaacccgctccgcagcctgaaccgctcccggcggaagcgcgccggggcttctccaaccagaggatttcctgctcccgccttatggccctgggctgggaaccgctctacccaagctttgcggacggtgtgcacaatgtgctggaggcactggaagagtaattttcacccccatccttttccacgttgaccggccctttccggacgttccatgtgaaagaagcagcaaaccttttgaaaaaacgacggaattgttccccctatccgcaccccttccttccaagcctctctcaaaatttcatgactgccttccccaccctgaaaaacaattattatatccgccgtctggcgcctttcctgattgtatatcttgtttatgaactcattgaagtagccatcctggcctttcttcagcaaacgggaacggactggaactccttaacgctcctccggcttctgggcaacctgctcgtggaaacatgttcctccttcctttaccttatcatcccctaccttctctatctggcggcgctcccaaaagcattccatggcggcaaaacggatcacgtgctcaccacggctttttttacgctcttctgcctgttgaactgctgtgaagaaatggcggaaattctgacccgtgagcacttctctttttactcccggcaattcctgcaatcaccgggacacgcctgggctcaaatagcggagggcgtccccattattcccgcgctacttgctgtcctgacaatttccacagcaacagtcgtcctcttttcaaaaaaactcgtacccctgcagccccctccttccgctccggttcgggcatccgcccccgtccttgcatgcgccatggccttcatcctctcatggggaagcagcggccccctgcccgcctacgggggagaaaatggggaaatagccaaggacggccttttctccttctttggggatctgtttgctgttactacgctcccccatctgccttccatctttggaattcccgtactcatcacgggaagcatcattctcctctttctgctggcggaatatattccggagcggttcatgtccgcaaccctccgcccgtcctttctggcgggcaatctcttccggcgcatgaaaaaacgtctccacctccgttccgattttacactctggctccttttactcctggcagcggtacttctcatccgcctcatcagcatgggagcctaccccctcatggacacgacggaagcacgctatgccgaaatgtcccggaaaatgctggaaacaaaccagtggctcgtcccccagttcgactacggcattcccttttggggcaagccccctctctccttttgggcaagcgctgtcaccatgaaactaggaggcgttaacgaatggagcgcacgcctggcccccttcctggcttccctggccatgggccttctgtttttcgcatggccgttccgctctcaatctgtgcaaaaggcggccgcgtgcttcctggtcctcgccgcatcaggcataggttttgtcgcctcaggagctgtcatgacggatgaatttctggctctgggcatcatgctctccatgatctccttctggaaagcggtggcccaaccctccaagcagccgtggtggaaatacctattttttgtcgggttggccataggcctgatgagcaagggacctcttgccctcgtccttacgggattcccaataacactctggaccgtatggaaccgggaatggaaaaacgtctggaacagtctcccctggataaaaggcgccttgctgatgctggcgctgagccttccctggtatcttctggcggaaaggcaaactcccggctttcttcattacttcattgtgggagaacactttcagcgctttaccgtcaaaggatggcagggagacctgtacggctccggacacgcttctcccctgggaaccatctggctctacggactgaccatgttcctgccctggaccctcctgctccccctcctgcggatgaaaaaaacttctccgttatctgaaaaaactacctttccgggagaaaattccttcctgtggctttgggcgctcagccccctgctcttcttcactctggcccgcaatatccttccggcctatgtgctccccggcatcccggcctggtgcatcctgaccgtacaggggctctggcaatggaacaaccgccgcccgggaatcaaacatcttatcttcctcccagcctccatatttggcatcatggccattttcctgctggggcacggattcgaccaacttgaataccgctgccagaaacagctgctccaggcctgggacgggaaatcccccctgtactattgggacagtgtccgccctccctactccgctcaattctactcatccggaaaagttcagcgactggaaccgggaacgctgcctccggacaacggaacaacctatctggcgatgaaacggacggactatcatcagcaccgttccctcctgtccggatggaagcgggaagcggaagaacggctctggctcctgctttccctccccgccggcccaggcaacggaaaacacgcgccaattccgccctctgaaaattgaagggggaaatgcacttcatgagtccggtacatgccggaaaaaaatccagccggcggccccgcccgtctttgactctcccctttcttgacttgccgggcgcgaacaggcaaaatcccgtgcgcaatgcgtatcatcacaggtcttcaacccagcggcaagctgcatgtcggcaactacttcggagccatggaaccggctgtccgcatgcaggaaagcggggaatctttctacttcctggcggactaccacgccatgagcaccgttcacgacgcaaacacgctaagggaaaactgcagcaacctcgctacggactttctggccgtgggcctggatcccgaaaaatgcgtctttttccgccagtccgctgtgccggaagtcaatgaactggcctggatactcagcaccgtctgtccgatgggcctgctggaacgctgccattcctacaaagataaaatcgccaagggattctcccccagcaacgccctgttcacctaccccgtgctgatggctgccgacatcctgatgtatgactccgacctggtgcccgtaggcaaggaccagaaacagcatctggaagtcacacgcgacttggcgggcaaaatgaacgaacaattcggagaaggcacctgcaaacttccggatgcgctcattgcggaaagcacagccattgttccggggctggacgggcagaaaatgagtaaaagctataataacacgctccctattttcggagaggaaaaagctgtccgcaaactcatcatgagaatccccacggattccacccccgtggaagatcccaaaccgacggaaggttccgtcatcctgcagctttacaaactctttgcctccgcgcagggttatgaagacatggtgcgcggtttccagaacgggggatgcggctatggagacttcaaaaagcgcctctttgacgcttactgggaatacttccggcccgcgcgcgaacgcagggcggaactggaagccaatcaggactatgtgcgccggacgctggaagaaggcacccgcaaggcgcgcgagacggcctctgtagtgctggacagggtgcgccgcgccgtggggctggcctgaaacggaataaaacggaacacccaggaaagccggggcagcacacgtttttttgtggcatggaaaagtacggaatgttatacagaaagatatgaagaatattctggtagctattgatttctccaacgccacggacgccgtcatccaccaaatcggcaaactggcctgccccaacgacagcatcatccatttgctccacattgtggaacccagcatttgctatgaagtctccggcgttctgccggatgaagtgcccgttcccgtgatggaccagacggaagaaaacgaagtcatttccatcgccaaaaaccatttgaaacagacggcggaaaaactctcccggctgacggacgccacaatcatccaggcggtggaagatgaatttgaaatcagcgaagcagtcattaattatgctgaaaaacaccacatcgacatgatcgtggtgggcaagcataaccacggcttcctctccaccgtctttctgggcagcgtagcaagctccgtgatgcggaaatcccccgtgcccgttctggtagtgcccgtcaccagggaagaacagtaaaaaccgccatctgcgccagctccgtcccaatccatgattaccatactctttataggcgatgtggtcggcgaacccggacgcaccgccgtgaaacgcatgttgccggaactcaaacgggaacacggggcggacttcatcatcgtcaacggggaaaacgcggctgccgggagaggtatcacgccccgtctggcacaggaactgctgcacgccggagtggatgtcatcacaacgggagaccatgtctgggaccaggcggagctggccccgtggatggaatccgaaccgcgggtgctgcgccccgtcaactatccgcagggaacaccggggcacggaagcgtagtcgtggaaactcccaaggggaaaatagccgtcatgcaggttcaggggcgctcattcattcagccgccgctggaaaaccccttcctcatctcggaagcggaagccaaaagactcagggaagaaaaaggcgtgcgggttatctttgtggacatgcacgcggaaacgaccagtgaaaaaatctccaccggctacaatctggacggcctggtttccgccgtcgtcgggacacatacccatgtgcagacggcggatgaaaccattctggagcgcggcacggcctacctgacggacgccggcatgtgcggccccgccgtcggggtgctgggacgggaacgggaacctattctccagcgtttccgcacctccatgccggccaaattccccgtagcgaactggcccgtgcgcctctgcggagccgtcgtgcaaatagatgaagccacaggcagggcgctcagcatcgcccgcatcagcaaaatcgtggaaaaaccggcctcctgacatgcatgcttcagcagcattcctcttcccgtacccggtggcggcgctctgcggatgttccggacatggcggaagccccgtgaagcgcggccagaacgcggattataagaaaaacctgtttcaacggacgccatccatcaggcgtcccgcctccccttcccggaataacgggaagctggctgtggcgtccggaatccaaggatttcccgcgtctccatattttcaggatgaaacaacggacagaaacccgggcgcccttattctccttaatctcccatactctggaacagacacgtggtcatgaactatgaagccagattcggcggtataggccgcctgtacggaaacagcggactatctcttctcagaagcgcccgcatagccgtcgtcggcattgggggtgtaggttcctgggcggcggaagccctggctcggtcaggcgtaggcactatcattctgatggatatggacgacctctgcattaccaacaccaaccggcaaatacatgcgttggcgtccacaatcgggcaatccaaaacggaaaccatggccacacgcatccgggaaatcaacccggaagcggaagtcattcccatcagcaatttctacacggcctccaacgcggaaaaactgctgtcggcggaaccggacgtcatcattgacgccatcgactccctgatacccaaggcccacctcatcgcctcctgttaccgcggcaagcaaccgctggtaacctgcggcggcgcgggagggcgcatcaatcccgcccggatagaaatagacgacctctcccgcaccaggggggattccctgctctccagcttacgctacaggctgaaaaaagattatgcccttccgcttggagaaaaagcccggaaactgaaaatcccctgcgttttctcccaggaaacgcccgtatatcctacctgcgacggaacaacctcctgcacacgtgatccggaattccaggggaaaatgggttgtgacgccggatttggctccgtcacccatatcacgggaacctttggcttctttgcggcttccgccgccattcaaatgctcttaaataagaaaaaaacaccatcgtcatcatgaacaaactcctgctttccctgctgggggccgccctccttcccgccttgacccaatgcaacaccctggaaaaagacattgccggcatcaacgcccgcaatgcggaaatagcccgcgaacccaggggaaactacttcgtcggccgccgctaccatgtgccggcaacgcgcttctggggatacctgcgccagccgggccagacttggagaacggcccaactcgtcatcatggatgaaagctcctgccgcaccccggaccgcctgccggaatacaccggaaatccgcgctacgcctacgacaacaactatgaatacagggtatacggcaaatacacgggcaaatacggttacgaacccaattccaatctgaggctgcccatcttcaaaccgaccaggtttgaagtggccaacaccacccccggctggctcttcaaaccctcggaaaaatatgataccggagccgttactctgcgccctgctatcatgcccgcgacaacctccctcccggtccggtaagaaaaacctgtctgcaaaaacgggcccgaaaagataaaaaagaagaaaaagcttgatattttcatttctctgcgctaaaaactccccgccttaaggcctccatgctcaggtggcggaattggtagacgcgctagactaaggatctagtggtgataaaccgtaggggttcgagtcccctcccgagcaccatcctctttcatacctcaagttgctggttttcagctcttgcggttttcgtttgccggcggcgggaaaataagccgcaacacattttttatcaacaggggagggcatgcgctataaaaagaaaggcatttccccacttccggcccccccgaactcttacttgccggaaacaatccggacgtaatcagtaaaggattggcccttacggcatccgttaaaaaccctccgccatcagggccacggcttcttcacggctcggcatggaacggatggctcccttgcgtgtcgtcacaatggaagcggcggcattggcgaacaaaagcatgtccgccaactggccttccgtcaggttttccagcccggtttccagaatccggtccaggcagcatcccaaaaaggcgtctccggctcctgttgtgtcaatagtcttgacgttcaagtacgtaggctggtgaataagtttgctttcataggcagcccagcttccttttctgccccccgtcaccagaataaggcgcaaattgtcgaactccctctgcaaaatcctcaacccttcttccatggtggcgcagccggtgaggaagaaaagttcctccatttctattttcatgacgctgcatgcgccgcatccgtagagcatttgttcccgggccagttccatatcaggccacaggggcggacggagattggggtcaaaagagatgagtgctccttttttccgcgcatggctgacggcatgccgggtagccctccgaacatcatcatgcgtcatggaaatcgtcccgaaatggaagatgcgcgcgtgctccaccaattcaagggccacttctcccgcagtcagcttcatatcggcgccgggattacggtaaaaggaaaattcacggtctccgtgttcgtcaatctgaacgaaagccaacgtcgtattgacttcccgggatgagacgagccctgaatctccgatgccttcttcctgaagcgtgcggcgaagcattttcccgaacatgtcgtgacccactttgccaataaaggaggttttgcgcccgagcctggacaacatggacaggacgttgcagggagctccgcccggattggcctgataaacgggcagttcccggtcatttattccgcagggagtgaagtctatcagcaattctccgagagctacgacgtcatacatgcttttgcaaatgttgaaagtgaaccttccggcgaaatataaaccgggagagataaagaagcatagaacgcgacggccttgcgggaaaaggaaaaagagattcattccagtcatggcggaaaaggaatttccccttttatcccgccctgcagaaacctcgaaggttgatggagcatccggatgtgaacaagtatggcatatatccctaacgccctccactcaggaaatgcccatcaagatgagacggcaaaaacagtcctgcgcgaggcacgcgcggaacgctggagagagtgtccccaacggggcaaatgcccccttacgggcatttatgggcgcgacttcttctgctccctcccattcctccgcaacaaacacgcattttcaaggcatttcaagcttctttaagagaattcaacccttttcaagcatgtgtgatggtcacagtattccgcatttttcttcatgattcccttcccatcctgtaatatgcgcccatgcaagaaaaaagcagcggctttcaatggcccgcacagtggacccccgatattctcgccacgttgatgttcgtggtgcagaaaggaaggattctcctgatacgcaaaaagaggggaatcggcgcgggcaaggtgaacggccccggcggaaagtttgaaccgggggaaacggccctgcaatgcgttttgcgggaagttcgggaagagcttcacattgatattgaggatgcccgggaaatgggcgtgctgaatttttcctttgcctgcggcaccattccggaaatccgctgccacgtgtttatggcgacgtcttttacaggcacccccacggaaacccccgaggcggagcccttctggtgtccggtggacgggattccctatgacctcatgtggcaggatgaccggttctggctgcccgccatgctggacgggaaacggtttgaggcgtttttcacgttcgagggggaccggatgatggaattttccctgaaaaccggggattgaaccgccaagaaaccccaggttgcggcctcctccctttaagccggatggggaacgctgaactttttttattccgtccttccccacggaggcaacagattcagaaggagggggaaacagtactgcccggcgctccagaaaagattccctgaaattcacctgaaggtggggggcaaagagggggcatttgcccttgaagaccattctgaacagcagctaacgttgaagggccggcttccgaaaaaaatggaccttcccccttgtaccgggatacatcatattcatctccttccctccaggtatcctgaaacggatcataggaattgctccggacgccagcatcgcagagatttccccatggcgtccagaaaaaggaaagttctccctgccggaaaccggttccggcttgaggttcatgcgaagggctggaattcagccaaatccgcggctccgtaagaaaacggggggatggttgcataaccggaccggtaatggaggtttaagggagcaaatcagctccggcctttattttttccaagcgcatccgaatatccactggtgcatcaaatcccttttccgtaaacgggcgtgggcttttctttttgcccggtatccgggaaatgctgatttttccgatgttttgccttctttttcaggtaatgcgcggatgcctgcgcccttgccgcttttttactttgcacggggaaaggacggctcccgcctccgggcatcaggccgtattctttaagcttttcctcccgcctccgttgtgataatgatgcgggagcaaccgtgtgatccttgatcgttcacttgctgactatttcaattcatattccattattcaacatgtatacccccgaattcaaaaacatcctcacttccaccctggacggactgcgtgcggaaggactttacaaggaagaacgctttatcgcctcccagcagtactcccaagtgacgctgaaggacggacgctccgtcatcaacatgtgcgccaataattatctgggccttgctaataatccggaagtgatggaagccgccaagaaagccatcgaccagtggggtttcggcatggcgtccgtgcgttttatctgcggcacgcagacccttcaccgtcaattggaagaacgtcttacccaatttctcggcacggaagacacgattctgtttccctcctgctttgacgccaacggcgggctgtttgaaggcctcctgactgcagacgacgctattatttccgattccctgaaccacgcttccattattgacggcgtgcgcctctgcaaagccaagcgcttccgttatgccaacaacgacatggcagacctggaagccaagctccaggaagcggacgccgccggagcgcgcgtgaagttgatttccacggacggcgtcttttccatggacggcatcattgctcagctggacaagattcacgagctggcagccaagtacaatgccattgtccactttgacgactgccacgccacgggcttcctgggcgaaaagggccgcggcacgcatgaataccgcggcctgttcggccatatagacatcaccaccggcaccttgggcaaagcactgggaggcgcttccggcggctacgtctccggcccgaaggaagtagtggatgtcctgcgccagaaggcgcgcccgtacctgttctccaacagcgtggccccggctatcgtagccgcttccatcaaagtgctggacctgttggaacagtccacggaagcgcgcgaccgcgtagaagccaataccaagtatttccgtgacgccatgacgggagccggattcaccatcggcggcaaggaccaccccatttccccggtcatgctgggggatgccgtcctgtcccagaaattctccgcccagcttctggacgaaggagtgtacgccgtcggcttcttctatcccgtcgttcccaagggacaggcccgcatccgcacgcagatttctgcggcccatacccgcgaacagctggacaaggcgattgaggccttctgcaaggtaggtaaaaacctgggcgttatttcctgattcccgcgctttccatggcttcggacgcatcacccatgcccggcggcaacctgccgacgctgcccgtcaagcgggtggtgcgtcccactccctccattccggaccatgaagttgtgcgccagatagggagcggcgcgtacggagaagtatggctggcaaaatccctgaccggggcgtggcgcgccgtcaaaatcgtatggagggaggattttgaagacgagcgctctttcaaccgggaatttgagggcattctccagtatgaacccatcgcccgcaaccatccggggctggtccatatcctgcatgtagggaggcatgaccaggattccccgttttattattacgtcatggaactgggcgacgacgcccgcaccggagttcatattacaccggacgaatatattccgcgcacgctccagacggacaagaagttttccggcaacaagcctcttcccctggattactgcctggaggtaggcagccagctggcccacgccctgctgtacctgcacagcaagaacctgacgcaccgggacatcaagccggcgaacgtcatctttgtcaacggacgccccaaactggcggacataggcctggtggcccatctggaccagcgcagctttgtagggacggagggattcatcccccccgacggccccggcacccggcgggcggacgtttacgcgctggccaaggttctgtatgaaatcagcacgggaaaggaccgcatggattttcccgaactcccggatgacttgccggaaggcaccgtgcgcaagaaatggcaggccttcaacaccatcatttgccaggcggcggaaccccgcattgaagaatgccccattgattccgcagaggagctggcggaaaaaatagacgtcctccggggatatgaagtgccttcccgtttccgtcttcagaagaaaaagaaacgccgcaaactcagacgggccctccaacttctggctgcagccgccgccggagccctgactgcctactggggggctttatggctcaacaacagccagcatccgccggaggaacctgcctcggatattcatccggatatccactcatccgctccggaagaagaatcccggaccggatacgtgctggtgaccagctccccggcgggagcgtccgtgtatgatgcggacggcaactatctggatgaaactccctatggccccattgaactgccttccggctccccggtagcctataccatcaagaaatcggggtttgcggacaaagaagaggcgggaaccgtcaaaggaggggccacgctggccctgggcggcgtgctgaaggagtaccatccccctacggacagccagccctggaaggatacggagggtgttacgtacctgcccgcagaaacgcgccatgtggcgcaaggcccccttaccgccgccctgttcaacaaatttctgaaggaggaccgccagaaagggaacttccagatgaaaagggaacagacggaaccggggcatccggagaaagatgtggccctgctcacgcaggacggcatcacggcctacctggcgtggctgaataagaaatgcgagcgggaggggctgctgggcaaggaattttccatcaatgcggatccgcttccgcaggcttccggcagcacggaaaaccacaatgcctacgtcctgaatgtcacccgcgtgttccaggtgcccattaccgtcaccactaacccgccgggagccagcgtctttttcaataacaggctcatcggacgtacccccattgaagaatacgtcaaccaggttccctacgtcattgaaatcaaactgccggggcacgccaccatgcgtcgcagggggctggatccgcaggacttatacctttccctgcagttggaaccggacaagtctgtcgtttttggctcgccctggaccaacagcctgggcatcaaactggtccctgtgggaggaaatgctctggtcatgacccacgaagtgcgcgtaaaggactttcaggaattcctgaaagctaccggaaggaaagctccggcccggcccggctttccccagggagaagaccacccggtggtgaatgtcagcaggcaggatgcgcgcgccttcgccagatggcttaccagcaaagagcgggccctgggcctgattgatcagcacgactcctaccgtcttcccaaggatgaggaatggagttcctgggtgcgtctgacggatgaacagggagcctccccctatgaaaagacgctgcctcatgaaaactcccgggaagccttcccgtgggggtattcatggccgccgcctgataaaacgggaaattttgcggaccagtctgccctgatttacctgccgtcctcccgcgttatcgtaggatataacgacggacagccgtatacggcccccgtaaaaacctttccacccaaccacctgggcctgtacgacctggaaggaaacgtcatggaatgggtagacgattcctacggggggccggaatccctccccatccgcaactacggcgtcgcccgcggaggcagctacctgtccttccgccccaaacagctcaccacttccatccgcactcccctgccggaaaatacgagggataacgcgctgggcttccgtcttatcctgtcttccgaacgccccgccattccaacggctccctgacgccgtatctgcggcagcggttttccccgctctttccccctctgaaacacaccgccccccccaagggggaaagcccttaggcttgagagagcttccggctctccgggaaaatgattgaaagggcctcccgttatgctaccatttttccgcatccttttcctgaatgaaaatcatcgccatcgccaaccagaaggggggagtgggaaaaaccactacggccatcaacatggctgccgccctggctcagctgaaaaagaaaatccttgtcattgacctggacccgcaggccaatgccaccagcggcatgggcattgacggaaaagacatgcccagcctgtatccggccctgctcggccagcttccggcggaagagtgcatcctgccttccggcaggaaacggctggatatcatcccctccaccatggacctggccggcgtggaaatagaattggcccgttccggcaaccatctgacccgcctccgggaaacgctcgctcccctgcgggagtcggacacctatgattactgcatcatggacacgccaccttccctgggcgttttaatgacctccgccctggccgcctgcgacgaagtgctgactcccctccaatgcgaatggttcggtttggaagggctggccaagattctgcacgtgacggcgcaaatctgcgccagcggcgccaatccccgcattcggcacgaaggagtactgatgaccatgtatgacggccgcaccaatctttcccgccaggtcatcgaccaggtggaacggcatctgccccagatgctgtacaaaacggtcatcccccgttccatccggctgggggaggcccccagtttcggccacaccatttttgaacacgatccttccggagctgcggcggacgcctacctgaaagcagcccgggaattcatcaaacgccataaaccctgaacatttgaagaaacaagcttcccggaatgccgcaaacctctgcgagaggaacaggcagaaagggcaccgcagaaaacttcctccttcattttgccttccgggtttgttgcgtccatttaacgtcaggaaaacatcttccataccgcccccccggagacggaggaaaacaggcattccccttgacttgacttccgcggcatataagaatgctccagctccgtttcaggaactttcccctcatgccagcagaagaaggccagccagacgaccagccccgggtgacagggcaagtcccgcctcccgctccgacgacaggcctggaacagattctgcccggacgtccgcccctgccccatgcggaagaaaaaggggcctttttcgtttaccagcgggagctggctcccggcacgcgcctggaacaatatgaaatcatccgcgtcctgggtagcggaggttttggcatcacatacctggcgaaggatctgttcctgaaccgcaacgtggttatcaaggaaaacttcccttcaagatactcctaccgggaccctctgaccgggcatatccggcccaataatgaacacgatctggaaaattacacctgggctctgaaaagctttctgagcgaggctcagacactggcggagctcaacaaccccggcatcgtcagaatcctttccgtctttgaagccaacggcacggcctacttcgccatggagcatattaccggcctttccctggattatctgggggaaaaacttcacagcaccggacaccggtatacggaagacgaactcaaggggctgctgacgcgcctgctccggattctggactatctccattcccggcacatttaccaccgggacatcaaacccggcaacatcctgctgacggaggaaggcacgcccgtgctgatcgacttcggagcggcacggcatgccctgaaacttcatgccgccaccgtcctgaccacccaggggtattcctccccggaacaggcgctgggcaaaacgaatatcggcccgtggagcgatctctattccgtaggggccactttttacgccctgcttacaggaaatcctccggaccgcgcggaagcgcgcctggcggaagatgaaatgcagccgctgcacagcgaccccgtgctcacccgctattactcacggcagttcctgctttccctggacaaggcgctggccccccagatcaattgccgctaccagactgccggcgaatggattcacgacatttgcgccatttccggggaagaatcctccgccactattcaagtcctcccggcagacctccgccatgcccatccggaaggaatgccaactcccggcgccgggaaaaacatcggcagcagaaaggccgccaccggaacggacggtcttcattccgcctcacgcaggcagtccgcacgcgctcttcgccgcaaccgccacatgatgtccctgctggtaggaagcgcatgcaccatcctgctgggagcgggagcattttatctgctggattacatgaaaaaagcccctatgggcactaccatcaataccatcaaggaagccatccagcagcccgcggcaagctccaacgtgggagaaccggaaccgccgccacgggatctggcatccatccgcattccggaactcaaaataacggaagacgcggcgctggaaccgcggtcgctgacggagttccgtttgcgccttgacgacaccatcctgacccgttccgggcttcctcccatcctgccggaaaaactgcgcatctcctgcatttatctccaaatcattcccccggcagcaaacggggaaaaactgtacctcaccatccgggactccaacggcgtcctggtggaccgctccatcaatgccgtcccctccttcacggtgccggggcaatccacctccaccttcttctttcccgcgctcccggaactgtccacggaccgcacctacacgtactcctttgaaaatgccgcccaccaggccgttcccatgcaaatggcatgtttcaaaaacgagacgaaacgcacggaagaagccttcccgaaaatccgtttcatcgctgctcctcccgtgccggaaccagccctgctccatgacccggcctacaaaaatcttgtggcggcaatcgccgcgccctccccggagaacaaaaatattctcgaccaggcaagttccatgccgggcatgctgccggccctggagcaactttccaaagccggctacccgatagcccagcaggcactggggaaaaccctcatgtctccggactgtcccggcggttccaggccggaagaaggcgtggaatggctttaccgttccgccacaggagggtgctatgaagccatgaaagagctgggcatcctgctcatggacatcccctcctattttccccgccttccccagcagcctccccttgcctcccgggattacgcccaggcggcgcgtttcctgagaatggcggtccaataccgggaccaggaggccctgtacctgctttccctcatgtactcccagggctggggcgtacccgcctccccggaactttccagcctgatgatggaacgcctcaatggatcttcctactccacggacagcctgaatcccaacgcgcctatcgcggcgtactggcttccccatcctctcgccggagaaaaaaataccattctgcgcttcactattccagggccgttcgccccgtcccagctcaagggcgttactctgcacaacacaagcctgaaggatgccttctccatcagtaaaatcaatatcctccaacatgggcgcctcattctggacatcatttccccccaggaagtgctgcccggcaaaagctccgctcccataggcatatccatcccggaagggctgctggcggatacgaccctgcctctggaagtggaaattttgctgacccccggaaacagctgcggcgtggtggaaatgccccctccggtggaaaagaaaaactccggaattgaaatcaattaagcttcaccgcttttcaacgtgaaacagcaacaggggaaacggaaaacacccttgattcccgcttggggcatgctacaaaagataaatgaatgcctctgttttcctgcggcgcatgctccctatgctggccgcgttcctgatggcctcctgcggtgatcctaccgtctcctactggaaagaggtggcggacatcaatacggaatactcgggaaaaagcgacgcactggtgcaacgcctcctgaaactgaaaaagaaccctacccttccgggcctggaagaaagcagcagggatacggctgacctgttgcgggaaagggatgaagaactggcggacctgagcacgaaaaacgtggatcccgccgtgacggcctatgtggaagaagaccgcaagctttttgccagaggaagggaattggcggaacgctaccagcaatactttgaaaaatatcttaagggaggaccggattttactccggatccttcccgggccgtcgcccatataggccgaggccggcaggaaatacgcaaaattctggcagaagcccgaaaactggaagaacgggctgaaatgctgagaaaagaaaaatcagctgagctcgagcaagaacttcctccgctgcactttcgccttccggagttgaaacaactgctatccagccgttagaaaacgcgcacgaaccacttgcatcaatgctgagtcacggccagtctgacagcggcctttccactgcacgggcggacacaaccggctcctgaaactttccccgtccatgttacggaaataacccttccctggatttacgggaaaaacgagccccctgctgtccatcatcgtttatttcagcattcaaatttcattccctgaataccccttagcacaggctccatagtttaaaattccaaagaaagggtatgcctcccctccacaaaaaagtcctattcatatttcatgaacggggctatattaatttttcaaattcacctgggagtttgatcaatgacgataaaatcctttttccccacatactccctccgggtacccggatctccatatccgtcccggaaacgtacttccaattcgtatattttcccgctggccagaggttgtaaacaggtcagcagcaaatacgcatccttgacgggcacttcatatttttctccggggttcagggtaataaagcgcataagattcgcgacacgttccatttgataggagggaagataccatgccgttggcctttctcccttctttccgtttccctgactccatatcttgatgatcatattcggcccgcgttccttgagaggatagaagtcgtcgaaaagacgcacagccttttctcccttgttgacaaacaccagcttgaagtctgggaaagcggctcttggatcaaacgaagtcttttccatcaccacggaacattcaattccgttgttcgccttgtccccccatgcaggagcatggaagaacaggctggctaaaagccctaaaatttggaagattttttcattgcagcgcgagcttttgggagaaggcgagaattcgcgcttcatcgtcgagttcccttcgtacttcccttcctggataggttccttgtacatcgtgacgttgaacgcgaccgcattgccactagagggatcgtaagcgttattctcatactttaaagccaccttgtaataaaatgtctcactatctccagggcgattgatcgaccacggagaaatcttttcttcctacatacttcctccgaacaccgggatctccatatccgtcacgaaagattacttccaactcatatttctcaccattgcgaaggcggcgtgaaggcccaaaatagtgcattaacagatacgcatctttgatgagcacttcatgtctttctcccggcttcaacgtgatgaagttcaagaactgtcctcgctcaatgcaataatgagggtaatatgctgctaccttttcctttttctcttttgtcaatttccaaaaaatctctatggaaatatgcggaccgttatccttgagaggatagaagtcatcgaaaagacgcacggtcttttcgcccttgttcgtgaacaccagcttgaagtccgggaaggcagccctcgcgtcaaattcggttttttccatcaccacggagcattccactccgttgtcggccatgtccccccacgcaaccacatggagggacaggcttgccagaagtattaaataccggaagatttttttcattgcagcgtgagcctggccgttgcccggagaccccccaggaaacaatccttaccctgctgattatagtagcgcatttccagttcacaagaacattgtttccagccttccagatcgacttcatccagacacaccggaatcgtgacgctgtattcctgaccgggtgcaagctcccggtagttcaagggtcgctggaaggtcatggtgcctatttccctgttcagaacgcgcattttcccctgttgcgtcctcaacaccgtcacgaaaaagaaatcggacgtttcgtcgttgatttcatcgggaatgcggacaggctcgtttccttcgttgcggaagcggactgtgattttgccttccgtgaattgggaagtatccgccatggagaggatcaaggacgccggttcctccgcaacagccatgctgcgggtttcaccttcgctgaccggaggcatgaaacagggaggctcgatcgttccaggtttcgtgataaacctgggaacattgttccaccccatcgcgtcggccagacgaatgacataggcggttgcctcgttcaggacttcctgtccggcgcaatagggtctgtcattggcatcatctggcaacgccagtacataggctgatgtctccgtccaaagatccaatgccatttcattggcaagagcctgcatgaacttcacggctttatccatgttcggttctttgtcgcaggagatagtctgcttttcaagcatttcctgtattttggagtccttccagtagaacttgtaggcatcctcccattgacggcggtggtgttcttcgtgggcgagggaagcctgcggcgtgtgccatgtgcccactcttccgcgggcctggtagccgttcatttcgttgaccgcttcgacggcttcttcttcattgagagggagatcaacatagggattcacgtaaatgccttcatacatagttagcttggctccggcagaaacggaaacaacacgacacctccatacgttttccgattcatctttgcaaaccgttacgcaaatcttaggtttcaagctacttacattgcagtcaccatccccttccaaatagacgggttccggtttctcaaattccagttccacttccttggatggctcacaggtgatagtggattccttttcaattgtccacaatttgattttgggggacggcgagaattcgcgcttcatcgtcgagttgccttcatacttcccttccgtaataggtttggtatccatggtaacgttgaatgcaatggcattgttgctgacgggggtgtaggcgttgttggtccacgacagggccaccttgtaatagcccgctttcaggtacctggaatcggtttcaatattcagcttgccgttgggtggtgtcccatccttttttatagcttgctcaccggcaatcgtcaggctgcctgtgtcgtcggcttccacgccgaaatagtacaagccgtcacgctccaccttgatgaacatttcgggagctccagtacaggtggcataatccgaaggagttccgtcaaagccatatatcatttcatcaacgccaagcgtcttgttgataagaggctcatacccttgatagatgcagacgggattaactgccttgttgattggtatataattgttcattgctattgttgttatttactttctggaaaaactgaaccatcagccttccggcatttctgcggcattacctgaacccatcaacacgtttaacgcgtagtcccccctcattcggaacgaagaggaacgacctcccctctaattttacgtgctgccgtgaacttgcaaaaaaactcctggtgcgtttttatatcctgattcacgccattttggaacaaggttgctccatatagatctgacaacaggcacgggcggcattccgccgcacaatcatgatgccttaaaaaacaagcattctcctccttctctgtccgttccgccaaagaaaaaggctgtttccagagagtacttcacttaaaaacaaagcatcttttccaaaaacgagattgacacccgcggttcttttccctagtatccgcgcacagcatcagcggcggggtagccaagtggtaaggcgacggtctgcaaaatcgttattcgcgggttcgattcccgctcccgcctccaagatgttgtcaaagccggttcaagtcgcgttcgtctagcggtccaggactcccgcctttcacgcgggcaacacgggttcgagtcccgtacgcgatgccagcttttcttttttccaacttgcaccggaatcttttttacgccatccccacgggatgattctggattttttctcctgttgtggtacagtagcttccgtcatggcagcccagaacgatattatgctgaacggagccccgtacgaactggcggaaccctgttccgtctcccggcttctggaacttttgaacatgaaaggcaaacccgtcgtcgtggaacacaacggggccgcgctcctgccgcaggatttttcccgggtgacggtttctcccggcgaccgggtggaaattgtctccatcgtcgccggcggctagggttccgctttcgggaacagtcttttccaatccgtcatcgccatgccatccatccacgtcatgtctcccacccttgccagccaagtggcggcaggagaagtagtggagcgccccgcctccgttgtgaaggaactggtggaaaacagcctggatgcaggagccaaattcgtacgggtggagatacgccgcggaggcgtgggcatgatcaaggtgacggacgacggcagcggcatgtcacgggcagacgccgagctgtgcaccaaacggcacgccaccagcaaactttcttccctggaggagctttttgaaatcacacacctgggattccgcggagaggctctgcccagcattgccagcgtttcccgcttcaaactctgtaccaggcagcagcaggatctggaaggctgggaaatacgcattgacggaggcctggaacacgaaccgagaagctcaggcgtctctcccggcaccgccattgaggtggccgacttgttttacaatactccagcgcgccgcaagttcctcaaatccgcagaaacggaagcttcccatgtggagcaccagatacgcctgcatgccctggcttatccccaagtacggtttgcctataaacgggacgaccagcttgttttcgaccttcccgctacagcggatctgcgcgtccgcatttccgcactgacggatgctgccacagcggcggccctgattccgatagaaacgaccatcggccccggtatttccatcacgggattcctgcttcctctttccgaagccagacgcaccagaaaagggcagtacgtctttatgaacacgcgccccgtggaggaccagctcattaacagggccattcgggacggctacggaggcttccccaccggactgcatccggcgctttttttgtatatggaggtggaacccgctctggtggacgtcaatgtgcaccccgccaagaaggaagtgagattccgccgttccgcagacgtggtaaataccattgtggaagccatagccaacactcttcaaaagcacgcccggcaggaaatccacgctgccgccgcgccagagccggagagaactcttcctcctgcccattctaccaccgcgccatatggggaaatacccgcccgttccaccaaccccggttctgctttcccggcggccgccagaccggcccctgcttcttccgccgcccaaccgccgctttcctcctctgccagacaatcccatgggccggtccgtccccccaccctccgggccattcccctgaaacaggttcccgccacccaggggaaactggattttcaccgtcaggaggatgaagaaacggcacgaaacgcccatgaaaacgcagctccagaaagggatgcctccgccggattttcctatctgggaacactccgccagcaattcgccctgtttgaaacgccggaaggcctggttctgatgcatcccaaggcggcccgggaacgcatcatatttgaacggctgcgcgcacgccgggaagcccccatgccgtcccagcagcttctggatccggtggtgctggatctggatccgcgggattttgccgtcatccggcagttcgccccgcattttgaccaggccggcatggccgttacgccctttggacagaatacaatcagaatagaatccatccccgtactgctggaactggaaaacgcacgtgcttttctcctggagctggtggaccgtctcacccagtccgaattcagccgaaatgccaaacgcgtggcttatgaaaccttcattggggaatttgccagaaaatccgcctggagggagcgcatttcccctcaccgggcccctgccatcctaaaggatttgcttgcctgtgaagtgccgtactgcaccccgggcggcaaacccacgctggtgaattattccgttccggaaattaaacgtaaattcggcctacaggcataaataagggaaccttgttttccggaaaacaggctgaaacgctgcaagattttacggcaaacggaaaatatgcagccaaagacggattgatgcccgcttctgcggtatattattttcccttaccgatactcagttttatttcagccgcagcaagggccggaaactctccctggcaacagggagcattttaccctgtccggctacggacaccttttccgtcttgtccgccagaactctggcattcggacgcatcctcccgcatacaacagggagcttgctcttggcaaggaagtttcccgcgtttatactgcagccttccagataaattcccagccatgccagactctccccccagcacctcccccgctccgcgcattgctgaaactgccgccgggaaaattctggcggggctgctggcccttttttacatcttcctggcaacgacggcggcaggcggggaatggcacacccttttccttcccgcctgctttctggcggcagccctcctgctgttctgcttctgtattctccggggatacaagattcccagccccggactgccgggctggctggccctggggctgggaggcggctatttccttgtccgggcatggttttccccctggttttattatgagagcgtagcggatctgggccttatcgccacggccatcgtcatgttcgcggcgggaacgtatgccggagccggaaacggggaaaagagtattcttcccgtactggctgcggcattggggctgctgaatgccctgctgtgggggtatcagaacataacgggaacggaagcctcctggttcagaccggattattccctgttcggcacggaaatccgcaacatcggattgttcggatacaaaaatttttccgcccatttcctgtccgtcaccggttttttcctttgcgcatacagcatggcttccgccagaaaatggggcatccgcctgttcacgggattggcgctcatcctcgtttccttcacgtgcggctcgcggtccgccttcccaaatgccctggctggcgtaaccctgtgcttctttatttatacctccagtgttttccgcaataacagaaaattttacacggcgtccatcctctttattatcctgcttttcctgggcacgtcctatgccgtgctggatttgtcccggggggcgggcaggcttgccgcccttctggatacattttccttcggcaaccggctggacctgtccaaactggcctgggcactggcggaccaggctccgctgttcggtcacggcagccggatgtacaccaatctttccacggagtttttctccggagccaacctccccaattttgcccaccacgaatacgcacaagccgcctgcgactacggctatgccgggctggggctgatgctgactctgctggccctgtttcttatttccggactccggagcgttctgaaattgtcaggagaacatcaacggcccaatcccctgggaccggcggcgttctgcgtattgtgcatcgccgctttccacgcctatggagaattcatctggcataaccctgccttgcttggagccagcgccctatgcggcggcattacctgcacggcccctctttccagggtgaaggcttcgcgccgagtcggccgctggcttcaagcgaccgccgcactgctgatggccatattggctctgtgttatgcgtttctggcttttccggtctggaaaaactcccttcaagccgtcccggcttcctccagcaatcgactgcccatgctggaagcggccgcctcctgcagcctggacccggatttggtgcggcgcaacattctgcatgccgcaggcagtgctccccccccaaacccagcccggctcaaagcattggagcatcaggaagaaaaagcggaactcctgagccccgggaaccacggcctgacggcggccaaaagcctcctttacatcctccagggacgcctcacggaagcggaacagctgctccgcccgtacgtagagagtcccggcaggtttgacgaccgtatgttcgcctggactaccatttacaataatatgctgtattcctggagtacggccattgctgcccagtccccaggacgcgccctgtccatggccatgacggcccagcgcctaatgtccgcccaaacggaccggtggctgtattatggggccctggatcccaaagtcaggaaaaaacactactcgcgcctcaatgagctcaagatgctcatcatgatgctccaggcccgcggaacgacgcccgacccctcctggaggaaatagtattctggagaatcggggaaaaggaatctgtgcagcagccgttatatcctttttccagggaagccgctccatacggaagtttccccgttttatccggtttcttttttaccggattccacgtcagcttatttgtccacggaacacagagcgtactgcagccagaaagatgaaaagccgacagttggcgcagcaagtccgcacaggcgttacgccggaattttaagcggattcagctatcttccgccggaagcggcagcctctccggaacagaatcgtttgtttctttttcccccaaccgcggactgcctcggttggcggtcccgtaaaacgcatgtcccgacgcagctcaacagaaaaaaactttcccggctctattcctttatcgaatctttttgtatgaacataaccatcaaacgaatttatgaccccaaggaacccggggacggataccgcgtcctggtggaccggctctggccccgcggcatttccaaggaaaaagcttcctgggacgagtggctgaagaacatagctccatccacggcgctccgccagtggtttgctcatgatccagtcagatgggacgcattccgcaaaaagtacgacgaggaactggatggaaacggagaagccgtttcccatctgctccggctggcgcggaaagggaaggttacgctgctgtactccgccagaaatacggagcacaacgaagctgcggctctgagggattaccttttgcaacggtttgcttcataaatagaagcatattcctgcacaaactccatccgcaagccccaaatgctgtcacgggaacctatgatacggcaggatttcttctctcgttcatgaacaagcgaagaaaatggaaaggaggtgaatacaatatggccagcagttcccacatgggtggaagtcataagggcagttccaaaaaacgctccgagactaccacaagcaaaaccgggcggcgcatcaaacgcgatgcttcaaccgggcagtttatgagcgataaaagctcaggctccaaggaaaaacattaatgcccgcgagttttccgcctgattcaggctccggaccgaatccggagcctttttatttttctccgcatccggaacacgaggaagtcttccgccatccactcaggcccaattcttcaaaagcccgaagaccgagcgcttcaggggctttccggtctccgcgaatcacaacggcaaaaggctcttccctgcccggaacgtaatacgcagcccgcagaaccagttcctctccatcctgatgggcgtaaacacccacgggcgtagaacagttcgcacccagacgtaccaggaaagcccgttccgccagcgcacaggcaaaagattccggatcattgatgccttccagcatttccgccgtctccctgtccgaggaacggcattccattccaacgatgccctgccccacagcaggaataaaaacttccaccggcaagggacgcatgtaaagttttcttccttccacaagggtttccggcgcgtacagccccaggcgttccaaaccggccctggccagaatcacggcatcccagccgggatgttccaccagctttcccaaacgcgtaggcacattcccccgcaggttttcaaaccgcaggccggaaccccagtacgtgcgcgccatcaggcgtcggcgcacgcttccggtagccagcgttccggaaccgttccagtccggttctttcgtgataagcacatcctccacggcagcacggggcaagacggcggccagcgtgaagccggcggcaagctcgctcggcacatctttgaggctgtgcaccgctacgtcaatgcggccatcccggagggcggtctccagttccttaatgaagatccccttgtccaccatgccggaaacgcgggccacatccgccagaggaacatccgtgcggcggtccccaatagtatggatgatttcacagcgcacgtccagttccggataacggagggaaagggcagcacggaccatatccgcctgggccagggccagggcgctcccgcgggtgccgatgatgagggtatttttactggtcataaagagcggaatccggaaaatatctggaaatgctgtcccggatgatggcctcgcaccgggaaacctcctgctcccggctgcgcttggcctcatccgccagctgggtgagggtatcaatatcgtagagatacacttcgtcaatatccgccacgtccggagaaatgttgcgcggcacggaaatatcaatcaaaaagagggagcggtatttacgggaggcacgcaaaggaagaagcgtttcccgggtgatgatgcagtggggagcagcggtggcggccaccaccacgtcaatatccctgagatagttcccccacacgtcataccggatggcctggccgccgatcatgcccgccagctctaccgcacggtcaaaggagcggttggccacataaatgccctcagcaccccgggcatgcagggcgcgccccgtaacgcggctcatctcgcccgcccccagaataaggacgcgggtgccggaaaggtccccgaaaatttgttccgccagctccactgccacggatcccacggaggttgccccggcatgaatctggctttccgtccgcacttttttaccgatagcaaaggctttctgaaaggttttgttggcgcaggccgcagttactccggcatccagggccgtctggtaagccgtttttacctggccgaagatttccgtttcccccagcaccatggaatctaggccgctcagcacgcggcacagatggcttaacgcatcttctccctgatggctgtaaaaataagaagccatatccagttccccgcgcccatcacccagaaaatgggataaaatgtgctcctgcgcattttccggagcgttggaccaataataaatttccatgcggttgcaggtggaaagcacaacgcactggtccactccaggaagggaacggatgcgctgtccttcttcccggagcttatgggacggcacggcaaaccgctcccgtatttccacgggagcggtccggtgattcaagcctaaacaaaccattctcatcaacttaccaggaaaatgctcatggatgcaataaagagggccacgcagcagcaggccaacatccttcccggaatgccgcggcggtagatgaaccacagcaggacgctgtagcctgccgtgagaagaatgacaatggaggtcttggccgcattaatggggagattcccccgccacccaagccattccccaagcagaagaaggaggaatgccacaagaaccaggcgcttcatgctggcttccagtgtacggatgggaggaagcacacggcaggtgccgggaatccggtgtcttttaagacattcattctgcatgcagaacgccgcccccgcggcagcggccagaccgccggctccgtaggacatcatggctatgcccacatgcgccgtcacccagaagtcatgcgtgccctgcacgtccgctccggaacggcctatcagcagggaaaaaaccgtcagcacggcaatagccggagccgtaaagatgccaagcacggacattcggtaagcacgtcccagcatcagataaaagagattgatgctccaggagaggaagaagagcacctctgaagcgccgcggatgggacacattcccgtctggtacgctttgacgcatagcgcccctgtctggagaacaaagaggcacgccatccaaagatgggcatataaaaaccgccggccggaagccagcaggcgccatcccagccctgtgaaagccagggagaggatgagagaggcaatggcccaccagttatcgttcataaatccggcccggaaatggttcaggaacgcaaatcgcgctcaatgacggcgtatgcctggtggttatggatggattcaaaattttccgcttccacccggtaccagctgaaggcggaatgactctgcgttttcaacgccacgttgcgcaccagatcttccacaaagacagggttttcataagccttttccgtcacccatttttcatccggccttttcagcacgctgaacagggagcagctcgcgcaggattccaccaggtcaatcaggtcttcaatccagacgggcctggaagcaaaacgcacggaataagtaaccagcccgcgctggttgtgggctccgtaggcactcatggccttggagcaggggcagagcgtcgtcacgggaacgataactgtcagcttgaaatcagccagtttgttgttcgcttccgcctccatctcaaaccggacaacgtaatccatgagcccttcaattccggtcacaggagcgtttttggagcggaaaaacgggaattccatttccacatgggaacggcgggcggacagacggcggagcagttcccgcggaatggccaaggccgtatgcacatccagcaaagggccatgctggtgcaacgcctccacaaaacggctcatatgggtgcccttgaattcttccggcagatccaccgccagagaaaccgtcgccacagtggactggatgcggttgagcttgtcctgtatctggatggggaagcgcaacccttttacgcccacccggtcaatggaaatattgcgcgtatccgcctcggactgggtatctttcagttcctgcatggggaaaaaggataatgggtggaaataaagcgggagtctgccctgttaccggacaaactcccgcctgcaaagacaattctaccgaaagagattttccttggggcttgttacggcagaaggttgatggaacgggcccgcttgatttcacgggttaccttgcggtgcatcttggcggacagcccggtcacacggcggggaagaatcttgccggtttcagaggtgaacttggacagaaaatcaggattgagcagattgacctgatccatcgggatgtcgagacggcggcgcggcatctggcgattgcacgtgcggaaacgaatacggcgttctacagtcttgggttcagtggacataataataaagataatcgataagccgaaccagttaacgcatttcacgatgaagcgtgcggcgcttcaggaaaggattgtacttaatcttttccaggcggccgggagtacgcaggctttttttattgcgcgtggtgacgtagcgggacgtaggctttccttcggctttggcctcggtgcattcgaggatgatgatgtctcttggcatgatgaaaatgtgttacgggggaggatttatacactattcttcgtcatcgtcaagagaaacagataaatctacatcattttgtcctccggcaaagcccagggccactctgggacggaacctggcattctggcctttttccttttcccactgggcctggcattccacggtaagccgtgcaaaggggatggcctccagacgcagaatgggaatgaccttgtatgacatttcgcagatgccatatgttccgttgtcaatgcgggcgagcgcctgttcgatttcatacaggccgtcctgctctttggaaagcaggctgagcgcaaaatcacggtcataggcgtcactgccggcatccgcctggtgttccccggagccggaagcctcactgccttccggatgattccggagagtatcgcgggccacgccgctcatgttgtccagagccctgtcgcgcaagtccagcagatgctggcgctgcatctgcacaaaaggctcccattcggggttggcggccagttccgccctggcggcggcaatggcttccgcctgttcatccgtcaattcatttttcgcgggagcgggaaccggggcaacgggagcaggagcagcttttttaaccggagcctttctggccgttttcggcgcaggcttcttttccatttcagccgcggcggcggcagcctttttggcggccttggcggctttttccggttcagccgcctttttcctgcagcatttcttcttggcgggagcctccaggtctacagcggtcttgcaatcggacttcccgcaggtctttttcttggaagccggaacttccttggcgacggtcttgctattggttttcttgggagtaggcataggaggtgtctctatgggctgaggttgacaatatttcacgaacagagggcggaacacgccccgctgactagactatgagacattacaaacgcccaaatgttcattcaagaaaattcagtgatgaaacaagtcattttcccccttttgcaccctctattttcctgtcgggattttaccgggaacatacttcttttaaccttttcaacgcccggtaaaattctatattggcgttatatgacagcttcaaccattccctccatcggcattgacttcggaggcacctccatcaagatgggggtcgtcaagggcgcggaagtaatcgcccacgctccttcaatagccacccaggaatatggcaatcccgatcaactgattgaagccatagcccagttcgtgaatatgctgcggctgaatcatccggaagtgcaggccatcggcatgggaatgccggggttcgtcaatttttaccaggggaccgtttatacgcttaccaacgtgcccggctggaacaacgttccggtaaaggacatgctccaggctgcctgcggactgcccgtatacgtggaaaacgacgccaactgcatggcttatgcggaatggaagctgggcgccggaaaaggaaaaaggcatctggtctgcctgaccctcggcaccggcgttggcagcggcctgatcgtgaacggagaacttctgcgcggggctacctgctccgccggggagctggggcagacgagcatcgactaccgggggcgtctgggccattacggaaaccgcggctccctggaagattatgtaggcaaccgggaaatagctgcggatgcacgcacgctgtatgccagccacggcattgacaaggccattgtggactgcaaccccatctctttggaacgggccgcattggctggtgatgaagtagccgagcaagtatggcgggacctggccgtaaaactctcctgcgccctgatgaattgctgctatctcctgaacccggaagccatcatcatcggcgggggcgtggccaaggccaaaaccctgcttttccagccccttcaggaaatcatgaaaacccagctcgccgcccctctggtggaataccttgaaatccttcccgcccagttcggtacggaggcgggcatcctgggggccgcccatctggctctcaacacccacttcggagaaacattccgggcctgatctcgtgtcttcctcccaaatactcaaactcgcccgcaaactggaattgacggcggaacaggaacgggatttcctggacgccatgcaggccgggaaccgttccagaagcgcgctggtcatcaccccgaaggcaccggaaggctacaggccgcccttgccggcaaaggacacgccgcaggagtgggggcattcctccatcttggcgctcccgtccggagaggcggaaaccaaacccggctccctgccggattacgaatgcggctattactatcccctggatctttcgtccgtctgggaaacggcccctctggcgcatcttccgtttcgtccggaacgctgcctggacatgtgcgcggcgccgggagggaaaagcattctggcgcagacgcgggtatctccgcaggagcatgtttccaacgaagtgaatccgaagcgcctgggcattctgcgccacaacctgcttcgctgcggcttcaccaatctgtacacccagcgcctgcgcccggaccagtgggcggaactggcccccgggtgttttgacctcattctggcggatgccccgtgcagcgggcagtccctgctggccaaaggcattcccaaccccggctgtttcaattcctccgtcaccggaggcaacgccaagcggcagcggggcattttgctggccgccctccggtgtctggctcccggcggcttcctgctgtacactacatgcacctacgctccggaggaaaatgaacgcaatgtcctgtacctgctgaaacgccatccggacctgcacaccgtaaccgtgccggagctggagcatttccgttcctccctgacgcaggaagcctgctaccggctcatgcccttccacggagcaggagcgggcggtttcacctgcctgctgcgcaaggagggaggccatccgctcccgctttccctgccggatgaattgaaggcatggcccattcatgccatgaattgttgaaaaaagatgaagataggcattttttccgacttgcacaaccgcacagaccatctggagccagccatgcaccggatgcgcctgatgggctgcggacatttcattttcctgggcgactgcaccaccccggagagtttccggcgcctgattgaactgacggaggactttcctctggatgccgttccgggcaacaatgactacgatgtggaaaccatgcggcggatggccgccagttccccagcggcgcgcctgcatccggaacatgcctttatcacccggtacggcatgaaactttccctttcccattacccaaaatacgccttgcgggaagcgcgcagcggaaacgcagacgccgccctgtacggccatacccaccaggccgtgagcgaaagatgcggcggctgcctgctggccaatcccggagaactccagggcaggaccggacgcatcggtttcggcgtcctggatacggacacccgcatcatcaacctgcataacctggactttcacgccccatgaacacgctggacgtctgctgtgccctgattgaactgcccgccgcacggggccctcttcttctgggcgccaaaaagaaaacggggcagtccaacgggcttctttacgaattccccggcggaaaagtggaaccaggggagaatgcccggcacgccgtcatacgggaaatacgggaagagctgggatgcaccgtcttccccgtccgcatgctcacccccgtacggcaccaggagcctgaacgcattatccgccttatcccctttctgtgccgtctggaactttgcgccctgccccggcccctggaacatgaaaacctggggttcttctcccgccgtacgctggaagaactgccctgggcacctgcggaccgccttgtgttaaaggaatggctggaagaacaccgctgaaagcagcatccctttcaaaatcaatcgctccacgggaaagttccctccatgtctgaaaagattgcaaaaacaccttggaacattccctaccatgaggtatataaggtggtggctgctgcactcgtcatcgcctggcaacgtggcccggaccgatattacaacctaatgggggcagccccgacgcagggctgactacgtcctataccggaaaagtcaaaacagcggcggaagtccccgctctattgaggcacgggaacgtggctcacagccagagacggtgcagcggtgtcttttttccatcacctgaatccagaaagctcgttctttcaacgtttctcccctccttgagcccgcaggtcagccgggactcccctcttgggcaacattactcctgtcgggattcaccgcctttccccgctcttctcaccctcgcagcatttacaggcacggagaagccaattccccaaaagatcgaatgcgggcgccttcagatatttcgtggccctccattcccgctccttccgtcactggacgagaaggaagaaaggaaacgttattagttaataaacagcaactgttaataaacataataatcccttagacatttccggaaatcatgataggatcatgctctgttgcggaaaagtttttaacatccgtgcaactttttcattattgcgaagtataatatagtcgtgaagggattcatcaaactcatcatcgtcattgccgttctcggaggcatctggtttgcctgggaacagtggaaaggaaatgaagccatccaggtggactaccagacagaacctcttgaaaaaggagacctgatgatcaccatcgaagcaaccggcgtcacggagcctgatgaactggtagatgtaggcgcccaggtcagcggaatcatcatggagttcggcaaggacctgaacggcaaggtggtggattattccagccccgtaaaagccggtcagatgctcgcggaaatcgacaagcttcccgtgcagctggacgttcagagggcggaagcctccaaagcgcaggccattgccggaatcgcccgctccaaggcggacatccagcaggccaaagccaagcaccagcaggccagactggaccgggaacgcgcggaaaagctggggccgggggatgccctgtccaaatccagctacgaccagtatattgcggatgaagaaaccgcccgcgccaacgtagccgtggcggaagcctccctgcaggaagcggaagcctccctgaaacaggcggaagccgcgctgaaaaaggaaatgcgcaacctggaatacaccaccatcaagtcccccgtggacggcgtcgtggtcaaacgcctggtcaacataggccaaacagtggtttccagcatgagcgcctccagcctgttttacatcgccacagacctttccaagctgaaaatttgggccgctgtgaacgaggcggacatcggcagcatccgcaaggggcaggaggtactgttcaccgtggacgctttcgccggccgcaaattcaagggcacggtggacaagatacggctggacgcaaccatgacgtccaatgtggtcacttacatcgtggacattgatgtacccaatccggacaagcttcttatcccctatctgacggcaaatgtccaattcgtggtggaggacatacgaaacgctttcctcgtttccaatgcggccctccgcttccgcccggaaacagaactggtcagcgctgaacaaaaagcggcctttgaccggatgcagccggagctggccgcccccgtccgggacggacaaaagaaaaaagccgtggtttgggaattgcggaacaatcttctttatccccacctggtcaccaaaggggaaagcaacggcatgctgacggccattgcgggagaaacgctccgggaaggaatggaaatcgtctctacggctcagatactgaaccgctccgacagttcgggggacggttcttccgcctccgccggcggggaaaacccgttcgcgcccaaaatgcccccgcgccgcaagccgagcacaggcaacacgaaaacggcagcctcggctggcaatgacgggccgcccccgcctccctaacccggggaaccgccttcatccgaccgctcaatcactcttttttaccgcatcaagcattccaacaacgtgatccgcttacgtgacataaccaaggtgtaccacttgggagaaatagaccttcaagtactcaagggcatcaccttggatatcaatgaaggggaattcgtctccctcacgggggcatccggctcaggaaaatcaaccctgatgaatatcctgggctgtctggaccgccctacctcaggccattactatattgccggggaagacgttgccaaattcaacgccgcagaacgcgccactctccggaacaagcgcatcggattcgtcttccagaactttaacctgctctcccgtaccacagccctggaaaacgtgatgatgcctgccgtatatgcccaccccgccctcagcatgaaagccatgcgcgaacgttccgtggaattgctgaatttggtaggcctttccgaccgcatggaccacaccccggcccagctttccggcggacagcagcagcgcgtagccattgcccgttccctcatcaacaaccccagcatcctgctggcggacgaaccaacgggaaacctggactccaccacttccaaggaagtgctgcacatgttcaaggacctgaaccgccaacagggaatcacagtcatcctggtgacgcacgaccccaaaatagccgccttcacggacagggccatcaacatggcggacggccttatctgcgaagggatttccgatatgcttagcaaggacgacgtatgaaattccttcctctccttaaaacctgcatcagggccctggtgcgcaatcccatgcgcgcagccctcaccatcctaggcatcatcatcggcattgccgcagtaatcgccatggtggaaatcggccagggatctacgctccagattaaaaataccatcgcttccatgggggcggacacgctgaatatccgccccggagccatctccaaaagcggcgtcaataccggcgcgggcggacgggcctccctgaccaacgcggactgcgaagccattgcgaaggactgccccatggttctgcgggctacccccgtggtgcgcgccagcggccaagtcatttacggcaacaagaactggagcccggaaactgtagagggcggttccgtggaatacctgaaaatcaaaagctggtatgacatggcgcgaggccagcccttctccgaggaagatgtggaacaggccaggcgcgtgtgcgtcattggccagacggtggccaaggaactcttcggggacgaagacccgctgggcaaggatatccgcatcaagaatgtcatgttcaaagtcatcggcatccttcagaaaaaaggggccaacatgatgggacgcgaccaggacgactccatcatcctcccgtggacaagcatccgctaccgcctccagggcctgggcggcggttccaccaccgcttccaccggcaacagcaccaccaccttcaaccgggcagataaatacaccgccagttccgtggattactacacggaaactacggaccagccctatacggacgcgccccatccgcggcgcttcaacaatattgattccatcatggctcagatttcagacccggaacgctcctccgaggccattgaccagattacggaagtgatccgtgccaaacacaacctcaaggacggccagctggacgatttccgggtatgggacatggcggaaatgtcccgcgccatgagcagcaccacggaagtgatgaccaatctgctgatgatcgtggccatgatctctctggtcgtcggcggcgtcggcatcatgaatatcatgctcgtttccgtcacggaacggaccaaggaaattggcctgcgcatggcggtgggcgcccgtccgcaggatatcatgcgccagttcctgctggaagcggtgctgctctgcgtggtgggcggcgcgctgggcatcatgctcggcaaggcgatctccatcatcgtcagccgcaccatgaactgggccacggcctcctccccggaagccatggctctggctgtaggcgtctccgtattcatcggcctggccttcggatggtacccctcctggaaggcgtccaagatggaccccattgatgcccttcgccacgaataacaccttactttttatttttccatgtcatccacgttcaaacatctcccccttctggccgcctgtttccttggctcctgcatggtaggccctgatttccggacgccgaccaatgacctccccgccacgtgggaggcgaacaggcccccccacagttcggacaaagatttgcgttcctggtggaatatctttggagacccccagctcaaccgcctggtctccacctccctcaacaacaatccggacatgaaggtggctttgctccgcatccgggaggccagggaaaagctccgcgtctcccaggcatccctgcttccctccgcagacgccagcgccgggtggagcctgtccccggacagaggttttcgcagctccacttcccagaacttctccctgggcgcgtccacctcctgggagctggacctctttggcggcaaccggcggtccatcgaagcctcccgcgcctccctcatgtccacagaagcttccgcaggggccgtgcgcacagccctgctggcggacgtcgccacggcctactttgactggattaccgcctgcgaacagctccgcatcgccagggaacaactggaaatccaacgcagcaccctcaccattgcggaaaaacgctacaaaacggaattcgccccccgtctggatgtggagcaggccacctccaccgtcgcctccacggaaagccgcatcccgcaactggaagcacaggtggcctcctctaaaaaccagctcgccgtgctgctgggaacatataattcccgtgtagaactgacgttgcccaaagcttccgtctttgagaaaacgcccaccgttccggtaggcctcccctccgaactcctgcggcgcaggcccgacgttatcgccgctgaggcggacctgcacgcggccgtggccaacgtgggcgtagccgtagcggatctgtacccgcgcttcagcctgacgggttccctttccagccgcggcggagatttcggccagctcttcagggaaaacaacaacgcttggtccctgggagggaatctgctccagcccctgttccggggcggagccctgagagccacggtacgcgcccagaaagccgcagcagaacaagctgcggaaacttaccgcaaaacgctcattaccgccgtctccgaggtggaggacgccctgatcgcctatggcagctatacctcccagatgcaatacctgcacaaggaaaacaacgctaacagagaagcgttccagctctcccgcaccctgtacatcaacggcgagacggacttcctgaacgtgatcaccgcccagcgttcctggctcagctcggaggaatccctggtcaccatgaagcagaacatccgcaaggccgtggtgcagctcgcgcgcgccctgggcggagggtggtaaccagccgctccctccaaaggccggggtcgccatccccggcaaacggaaccctgatttttcaacaggggacagggcagcaagggaatgactgaagaatcattctttgtccccccacattcagattaaaaaaggccgcaagaacaggaacgaataaactatccggaaacttccgatggaattgaacagatagccggggctcaggttaagaacactctccagccacttctttcatgactgcgctgataaggttccgggtcttcacgccgggcagcacgttcaagtccatgcggttcatcgcgtagccgaaggaaaggccgtgggccggatccgcaaaggcatgggaaccgcccgccccggcatgaccgaagccgccggagccgaacagatggcgcagcttgcggcccgtggcggggtctgcgggatcgtgcatgaagccgcaggaaaaggcggtgggcgttttcagcgtcaggtccggcccgtcaatgacgacgttccgcatccagccgcgcacgtcggacgggaatacccggagttcatccagccccaggcaggcctggtagaactgcgccatgccgcgggcggaagccacgccgccaaaggccggaactccggacacccacgcttccggcgtattcatctgccgcacactgttcagccctatcagagtattgaacgcacggtttacgggcgtgcccttgttcatgtattccagataaaacggcgtacccatgttggacatgtccatcttgccgggatacagcgtcgccacgcggttccattcggattccggcaacccgatgtaaaaatccagattcaacggtttgcggatgtattcctcccagtagcgccacaggcgttccccggtcagccgcagcatgagttcatcaagcatcactccgtaagtatgcggatggtagccgtgttccggcggctgccacgccggaacggtttcctccagggcgcgcacgcaatcctcatggtcaaacacgcttgccgtccgggaaaaagccgccaaaccgcattgatgggacatcatctgcgcgatggatgcatagggcagcgggaattcaggccacagttcccccatgctcatctgcggcgaggctccctgctggtgcagggccagcagaagggcggcggatgcggctcccttggtggcggagtaaacgggcaccagcgaatgttccgtccatggacgcgttttatccgctgcggcaaacccggaatgcagggaaacgatttcccttccttccttccagacagaaacggaggcgcccaattctccgtagttacggaagttttcctgaaaagcttcagttatctgccggtactcattcattcccttaaaatgacccggcgttactcccggcgtccggacaggaaaatactcccctccggctccgaaagcaagctccggcgctgccctggatggtcagcgccggaacaggacaatctgtaaaacatcagtctttcgtatgggcggccaggtatttcctggctcctacttcatccggatcctccttcagatcattcagggagaatttaatacggaataatctcatgatgaacacataagaacatggaatcagaaaagcgcccaccagtgtagccacccccatgccaatcaccaccaccgtaccgatcgcgttgcgcgccagagctccggaaccggaggaaagcatcagggggatgcatcccagaacgaatgccagagaagtcatcagaatgggacgcaggcgcagacgcgcggcagccagcgtagcctccatcaggcccttgccgcgctgcatctccagattggcgaattccacgatgaggatggcgttcttggccgccagacccaccagcatcaccagaccgatctgcgcgtagagcgtcagctccatgccctgccagaacaacccggcataggcccccagcacggcaatgggaaccgtgaggaaaaccgccaggggaagagaccatttctcataaagcgccaccaggataaggaaggcgaaaacggcggacatggtgaagatggcccccagcccaatactgttgcgcaccttattttcctggaagctcatgtcctggtagtcgaagccaaccttcgtaggatccatcgtctgatggaacacttcctccagcgcgtccatcacctgctgggtggagtggccgggccggggcatcacgttcaatttggcggcgttgtagatgttatggtgcatcacgaattccgtatcctctatctctctgatgttcaccagggcggagagaggcacgcgggctccgtccgcgttcgtgacaaagaagccgtccatcttctccaggctggcgcggtcttcgccctgcgcctggatatacacctgccactgctggccgaaggcattgaagtaattgatgaaggaggaaccgttgtaggaggccagaatgccgttggccacgtcaatatccaccttgtggaatttgcatttttccttgtccaggttcacgtacttctgcggcatgtccgccatcatcatgtctatgcacaaggctatttccggacgccgggaagccgcttcctggaaccgttgcacctgttcatgcagataagctacgccctgcccttccagatcctccagtaccatcgtaaccccgttggcggttcccacgccggggatggcgggaggttccagcaccatcgccatgccgtccaggccggcctgggccagctttccctgaagctttccggccagctccgcggaggtttccggccgttcgctccagtccttgagctcaatgtaggcaatgcaggcgccgggagtctgcacgctgttgaggatgttgagccccaccacggtagtaaggttcttcacggcgggatcctggagggccgtctcaaattttttgtcctgttcataggcaacctgcagggaggtattcggcttcaggatcaggcaggccagcagaaagccctggtcctcatccggaagaaagccgccgggaacgcgctccgccacaggagccaccgccccccagaataacaacaggagggggatggaaatcgccagcttgcgggccaggcttccgcacatgcgggtatagccgttggagacacgtccgtaacaccagttgaacaaacggtgaaatggggaaaagaggctcttcctgcccgcattccggggtttcagcaacagggcgcacaaggcaggggaaagcgtcagcgcattaaaggcggaaatgagcatggaaatggcgatggtcacggcgaactgcttgaacagcgttcccgtgatgccctccagcagcagggaaggcaggaacaccgccgccagcaccagggcaatggcgatgacggggccggatacctcctgcatggcggcgaaggaagccatgcgcggattgagccccttgtctatgtgctcctgcacggcttccaccaccacaatggcgtcatccaccaccaggccgatggccagcaccatgccaagaagggaaatggtgttcagagaaaaacccaggacgggaaagaggcagaacgtggaaataagggaaaccggaacggcgatgagcggaatgagggtggcgcgccagttttgaaggaaaacatacacgaccagggccaccaggataacggcttccatgaacgtgtgcttgatttcatcaatggaatagcgcaccgccgtagtcgtatccagggaaacgcgcccggtaattccttccggcatcagcggagccttggctttcagcagtttttccacgcggtccgccgtagcgatggcgttggaacccggagactggaagataacgatagccgcggaaacttctccgttcaggcggccggtggcggaatagtcttcagctcccagttccaccttggcaatatctttcaggtacaagatttcatccccattctggcgaatgatgatgtcttcaaattcatggggctccgaaagacgcccctgagtgcgcacggtaatggtctgctcctggccgtccggcacggggtccgccccgatcttgccgccggggttggtggtgttctgggcgtagatggcgccccgcacttcattgacggaaacgccgtaatgggtcattttggacgtatccagccagatgcggatggcataacgccccgcgccgtacacctgaacttcccccacgccctccacgcgcttgagttcatccaccagcttcacctgggcatagttcgccaaatccacggaattataactgccgtccggggatgtcagggaataaatcatcagcggaagccccggctgctgcttgatggtcacgcccgtgctctgaacttcctgcggaagctgggaggaggcctgcccatagcgcatattggtcagcacctggtcaatatccgtatcggaacccggttcaaaaatgacggaaaggttatacacgccgttgttggaggaaacggacgtcatgtagtccatgccctgcacgccggaaatctggcgttccaggggagtgcccacggaatccgccaccgcctgcgcgctggcccccggaaacatggcctgaagctggatggtgcgcggcgtgatttccggatactgggaaataggcaggttgaacatgcagaccagccccagcagcgtggtcacaatggcaatcacggctgcgattgcgggatgcttgatgaaaaacgcactcatggcttatttggcagttacggaaggagtggtggaaacaggggcggtatagatgaagggaacggggacaaccgtcccgaacccttccgtggcaccatgttcccgcatcaggctgttcgccttggaatactgggcggccatcatgccgccttccacgatgacgggagcatccgccggctttccgtatcctatttccttcagagattccggaatgggcttgaccgttcccgtcactatctgcatcagcatgggggccgtgccgcccttgccgtcaggcatgtcaaggactacggtttcccccggctgcacgtcaatgcggcgcggcgtcccgtccggagccaccaccatgatgttgcggtggttcatggaagaaagcagggcgcgggcgggaaccagcaaggcatccttctccgtacccgtcacggcgcgcacgcgcaccgccattccggaacgcagtttcagatccggattgggaatatggccgatgaaattgacggtgcccgtcgaacggctcacctcgctgtccacggaaaccaccttccccttcttttcaaagacggagccgtcttccagaatcagttcaaaatccggcatgtctcccatgcgcccggttttcacattcacggttccatccatcagacggctgagaacctgttttcccgtcacggaaaaatccacccggatggggtcgatggaagacatggtagtgagcggcgagccgctggcggaaatcagttcccccacgctggccgtcgccttggaagccagtccccggaacggcgcgcgtactttggtgcggtccagattgatccgggcgttttccagggaggcttccgcctgcttgatgcccgcttccgcctgttccagagcagcctgcatctccttaaggttctgttgcgcgtccgtcaggttcttgacggaaatagcccccgtccttatcagtttgtcatagcggtccaaatccttctgcaccctgtccagagaagcttccgcctgaagtttgacggcacgagccgtagccaggttggccgcctccctgtccacgacggcctgataggtagccgggtcaatttcaaaaagcagttctcccttgtcgcaaatggagccgtcccagtaaacctggcgtatcagcgttccggaaacttgcggcctgatgtccgcctgctccaccccgcgcaaatggccgaaccaggaagatttcaactccaccgttctctgctccatattcatcacggaaaccttgagcggaggcatttccctccggtttgcagcatccgcggcgccgttgtcttcccggcaccctgtcagcccacacagggccgctatcagtatatagtgtgctttcatgttgttggttaacaatattattgaagcatgcttcatatttttccaaacccgttccccggaaaaaagcacgggcttttattatttgagattgtcgtacatgcgccggagcaaatccctcagcatgctgcggctttcctccggcaccccgtccagcagcgtattttcaatcactcctatctgctggcaaatggcctcatgaacgccccggctcatatccgtcaggtacacattcttcagccgtccgtcttcactgtcaaaagccgtggttacccagcccttctgttccagcctctggacaattcccttggccgtggtatgggagacccccaaatgccgctctatgtccctctgggagacgttttctccgtcacgggacatcaggtaagccagcacccggccctgggaggccgtaacacgttccagagtcaaaccgcgcgtaagcatcatatccacgcggtccgtaatcattttcatcaaaaacgaaatcgtaaatgggtcggccataaaacaatgaagcatgcttcaaaaacgtaccgataggtactctttatccggacgcaagtcaagcggaatcagaatgacagagcgcgggaaaaacacgttgacctcaccagtaaaaataaatcaaatccgttcttcatcaataaactgaaaaaacaaaccatcgataatccgaccaccttcgcatttctttcccgcatcatccggcgtttcccggcaaacataccccttccagccacaggaaaccaatgctccgcgcagggataaagaaaaaatacctaaggaatggcccgcatatcaaaaaaggccggaaccgcttcgccttctttccagggacaatacgcgcagccgctttccctctaccttgaatttcacctcccagccagagaacgaaaggccgtaaacccgttccggatcatcctgatactggggacggggatccagggacagcgtatcttccagcgcactcctctcttccggagacatggaaccgccaaaagattcgggaatttccacatccagccgttcataggggacagccgtaaacccttccgacgcctccggaatgcagtccgccagaggaacatagggcttgatatccagaatgggggtgccatctaccaaatccacgccggaaagatgcaataccgggccgtccagaggatgcaattccacccgttccagcctgacggcagacaacccgatgggattgggacggaacggcgcacgcgtggcgaacacccccatgcgcacattgccccccagccgcggaggccggaccgtagggctccaccccttatccatgttttcactgaacacccagaccagccacagatgggaaaacccttccagaccacgaacggcatccggatggcggaacggcggctcaaataccagccgcgcccgcgcatccggaaccaggccgctctggcgcggcgcaccgaatttgtccggataacacgtgctgacgcgggcgacgggctgcaagcggagactgatagttaataattaatagctgccggcctttctccgtgacgctttcatcagaagcggtggagctgttctccgaacaccacggcatccacttttcccttcaaggtcttgcccaggaatggagtgttgcgggcgcggctgcggagcgtttcatccgtgacgggcgtttctccttccgggtcaaacaccaccagattggccggagccccttcttccagggagacgggggccagccccatcagcctgcggggagcatcgctgcaggcgcgcaccaccgtctgccaggacatttttccaggttccaccagatactggtaaatagcgggcaggaacgtatccagcgcaatcatgccctgcggggcgacaacgaaatcctgaagtttggaaaacggcgtgcagggcgtgtgatcggaaacaatgcagtcaatggtgccgtcattcacggcggcaatcagggcatccacatccgactggtcgcgcaggggcggcagcgtcttgtagcaggtatcgtaccggcccacgtcctcatgcgtgaacaggagatggtgaagcgccgcttccgcgctcaacccggcggttttctgcttgcagcggcgcaggatatccacgctgccggccgtagagacggtctgcacatgcagggagttgcccgtatccacggaaaggcggatgatggtttccagccctatttcctccgcacaggagggggagcccatcaaccccagacggtaggaagtagtgcccgggtgcatggccgccctggccgtcagggacggcacgtctccgcgcagggcgaaagtaaggttcaaattgctggcgtactgcatggcgcggtacagcagcagcatgttgtccggcgcacggtccccgtccgtgatgaaacggacgcccttggcgcgcagggagtcgtaggaggcctgctcttccccgccgtcccccttggtcaggcacccggaggggataacctccaccagagcatccgtccggcatatttccatgaacgtggtaatctgggcggcattgtccatcacgggttcggtatccggcatcgccatcagtccggtcactcctccatgcagggcggcggcggtagccgtagccacacgttccttgtcctcccggccgggctggcacaaatgggcatggatgtcgaacaggccgggcagaacaagcttcccggaagcatccagcgccttttccgcggcgctctccaaaagcgttccggcaggagctttcgttgtaatcacccccccggaaaccagaaggtccgccggggcggaaccgtccgtcagccgggcgttgcgaataagtacggaagttttcatgaacaatcagtgctgggtttgcggagtgagatggtaaaggatggacatgcggcaggcgatgccgttttccacctggcggttgatcaggcagcgctcatagtccatcgccaggtcacagatttccacgccgcggttgaccggccccggatgcatgatgtacaggccttcaccggaaatgcgcttcaggcgttcttccgtgacgccgtaaatcttgttgtactcccgggcgctggggaagaaaggggcgtcctgccgctctttttgaacgcgcagcaggtaaattacgtccggcttccaggcaaacgcctcattgaaatcggaaaaacggggaatgccggaatgttcggtgcgcggcaccagggaacccggccccaggaaggcgacctccatccccagcctcttcatcagcagggaggtggaacgggccacgcgggaatgcaggatgtcccccacaatcagaacgcgctttcccctcacatccggaaacacctcccggatggtaaaggaatccagcagcgcctgagagggatgggcgtgggctccgtccccggcgttcaccacactggcgcaggtatggcgcgcaatcacgttcggcaagccgctgttgtaatggcgcacgattacataatccactttcatggcctggagcgtggcgatcgtgtcctgtacggattcccctttcaccacggaagaggtggacaccgtgaaattggtcacgtccgcagacaggcgttccgccgctacctcaaaagaggaacgggtgcgggtgctgggttcataaaaaagcgtcagaacggacttgcctttcagggcgggcacctttttgacgcttttggtaaaaagctccttcatcgggccggccgaatccagcagcgtgtgaatttcctcgtcagtcaatgaggagatattaagaagatccttgcggggatgattcatgggaaacggagaatggattgggaaatttttcagtgggagggaatgaccacgctgtcctcgccgtcagcctccttcatgcttacgatgaccttggctccggcatggtccagcacgtgccccgtataatccggctggatgggaacttcccgcccgccgcggtcaatcaggcacgccagttcaatacgggctggacggccgtagtcgaaaagggcgttcagggccgcacgtatggtgcgccccgtataaaggacgtcgtccaccagcacgaccctcatgtcatccgtggaaaacggcaaattggaggaacggagggaaggccgggcttccagcttgaagatgtcatcccggtacagggaaatatcaatagagccgtactgggcttccactcccagctcctttaccttgtccaccagacgccgggcaatcacatccccctggctgagcaggccgacgatggcgagaggttctccggggaaacgggccacaatgccgtgggccatgcgctcaagcgcacgggaaattcccggaccgtccaatacgatttcctgtgaaggaggagtcatttgccggatgggggaaaaagttcacgttacagccccgccagttttaaaatgcggtgggcggccatggcggcattgacgggggttttcttatgcaagccaaccgtagtgcagggcacgccgccgggacactgggcaatcgccagcagggcgtcaatgccgttcagggggcctccggggaccggcacgccgataaccgggagggaacagctcatcaccaccacgccgggaagggcggcggacaggccggccacagccaggataaccgctttttctccgctggcttccaaatcccccaggaacctgatcagctccggaaggtcgcggtgggcggacagaacggtttcttcataaggaacattctcctgagcaaaatactcgcgggccggttccataaagggcttatcattcgggctgccgtagatgacgatgactttcatggctgtgtgtgcggttgtgaaacttgcagattatgcccccaagccccctgccctggcaagacttaacctgcaaaaaaaggaaggccccgggtggaaatggacaacgggagaaaggaaacacaggagttccggaaccgttccgggaaattggcccggcatcccggtcattcctccaacccagattcgcccatccctccgccctctccgggaaccttcagttttccggagaggatatccttcctgatacggtaaagagccttcaacctttccttatcatccaatccttccgtttcccgcatcaggtataaagaaaactgtacggaacaattctccagccgatatttttccagaatgctcccccccattttcatgtattggcctccgtactttccgtaagcgttctgaatttcatcggcagtcatcttctctctttccacccgttccagcaatttcccggactccctaatcatcttcagatgcatggcgcggtaatcggaagggcatttatccagaatcccagcccattcgggagattgaatatatttcagcgtggccaccagaaccgcacgattatccttttcctccaactccacaatgcacgtccaaataatgcccagctgcaaatgcctggccatggcctccctgtacgccgctattttcttttcatcctccatttccaaatccacattagccatggagggcgccgctatatcctgggacatgccggaaaaagtcatcaaaaacgcagggagaattccccaccggaacagatttgacatggaaccacgttacaggaatcttttgcgcagggtcaacaatattcttcccttccgccgcatcccgcagcattgacggccgccgccacggcggactgtctttccttcccggaaaaaacaagcctgcccccattcccggcttgatggcatccggttccggcataacaaggctcacaggggcgtatcttcatccagaaacgcagaaaaactgcatcgctccggcggccggacgcttgaaaaaacctagcgggtcgcctgctgcgccatggcctccgcacaacggcgtccgtccagggcggcggaaacaatgccgccggcgtaacccgccccttcgccgcatgggtacaggccctccagaccgggatgctccagcgtggcggggtcccttggaatgcgcacgggggagctggtgcgcgtctcacagccaatgagctgggcgtccgctccggcaaatccccgccatttacggtcaaactgccgcagcccctcccgcatgcgccagacaatcccttccgggagcaattcatgaaggggatgggatacgatgccgggatgatagctggtaggcaacagggaagaagaagcgcgccctttcagaaaatcctccaccttctgggccggggctttctgcatgcctcctccggcacggcaggaagccgtctccagcgctttctggtacgccacgcccgccagcaccccgtgttccctgcaaaacggttccgtatcttccggatgcacgctgactacaaaaccggcattggcaaatggagaatccctccgggccagagacatgccgttgaccactacctcatcgttctccgtggcggcgggcacgatgaagccgccgggacacatgcagaaggaatggacgccgcggtcctggatggtggtcgtcacggaataacgggctgccggaagctgctccgggcgcctctgctccggattcaggtggtactggcgcgcatcaacaaacgcctggggatgctcaatgcgcacacccacggcaaaggatttctgttccagagccagtccctccgccagcatcatgcggtacacgtcccgggcactgtgcccagtagccagcaaaacggaatccgccgcaaattcccggccatccgcgcaggccacgccgcgtatgcggcggccgtccgcagaacggagcagatgctccacacgggcattgaaatgaatttccccgcccgcgcgaaggatggattccctgatggctttgacgacattgggcaacagattggagccgatatgcggatgggcgtccgttaaaatttccctgggcgctccgtgggctacaaaaatctcgtaaacctcccggacggggcctctcttggtcgcgcgcgtaaacagcttcccgtcggaaaacgtgcctgcccctccctctccaaaacagtaattggaatcctccatcaccgtgccgcggcgcaggatgggagccaggtcaaaccggcgggaggaaacatccttcccccgttccagaaccacaggcttcatacccagttccaaacagcggagcgcggcgaacatcccggccggtccgaatccaacgatcagcgccacgggggagccgggacggacggacggataatcccgggagggaagacgttccggcggcagcgggctatccaccccgaccagcagccgaagctggaagagaatttttttctgccgggagtcaatggactccttcaccagccgcacatctttgatacgggagggggaaatacccagcttccgcgccacggcagcgcggcgcacgagctcgctgccggccttttccatcggcagaatcacatccaccgttattccttcccctccgctcacagtccctccttccccggccggggctgctgctgggtgatgcagtggatggcgccgccttccagcaccagcttgcaggcatccacccctattacctgttttccgctgaaacattcacgcaaaatgcccagggcgcgatcgtcattccggggctggttgaatacgggaacaatgacggcctcattaacaatgaggaaattggcgtaactggcagggagctgatccaggcgccagtcctccgcatggaggggatccggcatcggcaggggaatcacctccaccccggaaccgtccacgcatctcaaatcctgaaggcgttcattattctccgccagagcgcggtaatggggagaggaagaatccgtttccacgatggaaactacggcatcccggcacacaaaacgcaccatgtcgtcaatatggccgtccgtatcatccccttcaatgccggaaccgagccagaaaacggctctgacgcccagcatgcgcttcaattcctcctcaatcatggcccggctccaatccggattgcggttgggattcagcagcacggactccgtcgtcaccagcaagccgtccccattgccctcaatcgcccctccttccagaatcagggaagaactgcgcacgggaagccccagcgccgccccaatcagggcgggaacgccgttgtccaggtcccacggggcaaatttgccgccccacgcattaaattgccaatccgccagcatcagggaaccgtccttcacatcctggacgaaaacggggccgtggtcccggcaccatacgtcgttggtcgggtggttgaacaggcggaattgctcctcactcactccggcggccagcatcgcctgcctgacgccgggatgaaggggagctgcggcattcacgcatacaagggcatgcggagcaatggcagcggccacgctcccataagtctgctgcaactcgtccagccccccttgccataaatccctgcggtggggccaggacagccagacagcatcctgaggctcccattcagcgggccagcgtacatcgggttccttgttcatggcggtatcgggcggttcaactgggctggtcctgaaattcataaggttcttcaaaagccttgcggaagctcatgaagcccttgaaatcatccagggaatcctccggctgtttggaaaaaacgtcttcctcaatcagtaaaaaaaccatctcccccacattcttcccgttcctaagcccccattccttcatcacggtggaagccatgggcccgaactgggcgagggcgtaatcccggaacccttccagcagttcctgcccgctgacatgcctctgagagccgttttccctttcttcaacgcgctgcatggtaaaatccagcgcatctttcagaaaagaatatgcccgttccgcaaaacggggatccttccgtacgatacggctcacggcatcttcaaacgtaggggtggtcatagcggctcaccgctaccctatacggccccttgtgaaaatcaagatttttgggagcactccagcttcagccctcccttggggacagcatggggaaaatgaaggcagccgtcccctcgctggaacggaacgccggacgcggcagacggcaaaatgcccgtccatgatatagagcctcaaaaaacgcacgcgcccgcattttgaatatcatgcttctgcatgagcgcccctccggcaggcagcggtttttacgttctgatgccgtcaaaaagccctgtaagcaggaaggaaaccttgccagcctatggtctgtttgttatgaacggaatactttatgttccgttcctccatcatgcttctggcaaccatgctgtgcgtttcctgcgtatcgcaccggcctatccaggacagcagctccccgcccattgacgcggccaatcccctggacggcacccccgtggcgctggcgtggagctccggaacgcaattaatgatgggcgtagacacgggagcagtccagacatccctgcttttctccccggcagtggaatccatcggcgcacgcctgcgcggcaggggcgccatgcgcacggccaacgtgcccgtttccctgaaggatgacggggaacccatttcccggaaacaggacgtagtaatggcagaccaggccccgtatgacggtttgctgggctgggaatgcatccggaaatatgtgtggaacatcaactatcccaaacgctcccaccgttttttcaataaacttccctccagaataaaaagctggaacaagctttccctgattcccgggtccgactatccgcaaatcgcggacaggcacggaaggcgcatcattctggacacgggagccccccacgccgtttacatctccaaaaaacgctggaatgccattaagcaggcctacccggatgcgttcgtcagcgtctattccggctacagccccgccgcaggcggcttttacgcccacgaatgcatgcatgtaagctccttccagctcggtccactggaattaaaaaatatcctgctctgtgaaagcttcgccaacccggaagtgatgggcatccccgatgacatcgacatcatcctgggctacggcgctctggccgcacgccagttctggctggacggcccggggaacgccctttatttcagctccaccagccaccggatgcccgcccccgcctccttcaacctgatgggaggcacctttatccaggacagcaacgggaacggccccatgaaagcttacgtggcagagtggtctcccgcatgggacgccggcctcaggacgggagatgtgcttatttccatcaatggaagaaagaatccctatccggacctcgtagaatatgttaccacccagcggggggctcaggccagcgtggtggtccagcgcaggaacaggctggtgcgcatccaatgggaagttccggccgcgccccctgccggggattattaccccacgccccaggccattacggaacaggaattcgaaaaccacgtcaggcagcaggaaaaaaaagaacagacccagccctccgcagacggccagcagcctccggctacggccggagaaactccggatgaagcctctcccgcagctgacgggaaaacggacaaggcctccgctgcctgagccgggccagcaaccagccatctctctacaccggcatgaacaacgaacaacatcaaaatacccaaacttccgccgcccccgtcattccctcccctttccagaagaaaacctgctggcatgccctgacaggcgtatccattctggtgatgctgggcattgcggccttcgtcatttttgaagtagtggaacttctggggtttctggaaccggtgctcctgcccatcctgattgccgccgtcgtggcgtatttgctggaacccatcgtttcctggctggtgcgtctcaaattctcccgtccatgggccgtagtcacggtcatgtttgcggctctggccgttctggtaggctttggagccacgattctccctcccctgatcaggcagacggatgaactgatcgacaaccggatggagctatgggacaaaacctccgaactgattgactccaccattgaaatccccttcatttcccgcaccattgacagtgtttacagcaccagcctgcgggaactgaatgccagccattatacggaagcggaagtccatgacctgagaaacgcccggaccgcccgggaaaagctgggagcctacatgaccatcaattcctccttttaccaggacaagctgatgagctggctcacttccgggggacgggccctgtacagcaccataggaatcatggtcagcatcctgatcacgcccattttcgctttttactttctgctggaggcggataaaatcaaagagaaatggcccagcatcctgcccctgaaagtctccaaattcagaaaagacgtggtggacaccatggaggaaatcaacggctacctgatttccttcttccgcggccaaatgctggtaagcatcattgaaggcattctgattgccatctgcctgaagctgataggcctgccgtacgccatcaccatcggcgccgcggtctgcgtgctgggcatcgttccctacctgggcatcatcaccgcctttatccctgcggtgctgctggcctggttcacatggggggatttccagcacgtgctgattgtttcgggcatcttcctggccgtcaaccaatttgacggatggatcatccagccgaaaatcgtgggggattccgtggaactccacccgctcacggtcatgttttccgtgttgatctggacactcatcctgggcggcttgatcggcgccctgctggctgtccccctgacagccgccatcaaggtcctttacaagcggtacatctggcaaaatgccagcatgcgccccatgacggaacccgtgcttccgccggaacatcccggcgaacagcctccggacacacccgaaggttcggcccacgcttaaacagcggcatccttccgaccatcctttccgggaaattataatcacacacacctgaaaacatgaataaatccgcattacacctgatgcttgccatggcggcggcagcggcctgcccggccgcagtcacgccaacggtcaagccccccaaggccatcgtcatgatttacgctgacgacctcggctatggagacgtaggctgctatggagccaagggaattcccacccccgccatcgacaagcttgccgagcagggctgccgcttcacggacgcctattccaccacatccgtctgcaccccttcccgctatgccctgttcacaggggaatatccgtggcgcaaggaaggcacgggcatcctgccgggagacgccgccctcattatcgataccaagaagcccaccctgcccaagatgctccaatcccacggctacaaaacctacatgataggcaaatggcacctgggcctgggggaaaaggggaagaagattgactggaacaaacatatctcccccagcccgaacgaaatcggatttgacgagagctttatcttcgccgctacgggcgaccgcgttccctgcgtgattctggaaaacggcaatgtccgcaacctggacccgaacgaccccattgaagtatcctacaagcacaacttccccgggcttcccaatggcaaggacaataaggaccagctcaaactcatgtggagccacggacacaaccaggccattatcaatggaatcggacgcatcgggttcatgaagggcggcaaaagcgccttgtggaaggatgaggaaaacgccgatgtcattacggataaggccattgaatacattcagaagagcgccaaagccaaggaaccgtttttcctgatgttcgccacgcatgacatccacgtgccgcgctgcccggaaaaacgctttgtgggcaagagccggcacggcgtgcgcggtgacgtgaccgtggaactggatgactgtgtgcgccgcattacagaggctctgcaacaggccggtctggaaaaagacgccctggtgatcttctccagcgacaacggccccgtgctggatgacggctacagggatttcgccgtccgggacaacgccacccattcccccgccggccccttccgcgcaggcaaatacagcattctggaaggaggttcccgcattccgtttatcgtcaaatggcccggcgtgatcaaacccggaaccacgagcaaagccctgctcaaccaaatggatctgggggcctccctggaacagctgctggcccccggcaaggccaattccttccgtgactctgaaaacgtgatgcccgcccttctgggaaaatccgccaaggggcgtgactaccatgtcatcaacagtaccggcaaggcattggcgattcgccacggcaaatggaaattcattcccgccggcgtggccattcgcgacggcatcaacggagcctccgtaaaaatgagcaagtccccggaaggaggaagcctctttgacctggaaaaagacccgaaggaacttgacaacgtagcctcccagcatccggacatttgcgaacagatgaaagccaagcttgaggaaatccgccagaggcccgaaaccaaggctgaccaggaggacctgcttcccttggacgactaacatccattcgggccagatcatgagagaatccgccacatgctcccaatgcggccacgggtacacctacccggccggactggacgccaaaaccggcatgcgctgcccggcgtgcggccttctgattcacgttacaacggggcttcccttcggggaagcctcctcttcgccatccggccgcaaaccggaaaacgccatgaaaacgcagcccgccctgcctcccgtcaggaaaaagcggacgtctttctccggacgcgatactgacgaacgcggcatccggcaggaaaacctgccgcagcggccagccgcagcatccggccgccggattcccgctacatcatggctggcatgggggctgtccctgatcgcgttgattctggcctttattttcccctcctacggaaacggttccacagatccgctgtacatgcttcagtgcctgccctccatggtattcggctgcactgcggccatccttttcatccagggcctggcggctatgcgccgctaaaaaacaaagcctgcggccccatccggggcccatgcggcagccccgtcccaaaaacggccggaatgcctggtttccatgcccctttccgcggaaccgggcttttaggcttgcctgtcaaatgaacagattttaagttacgtcccggtaaacgttatggaacgggaggcagaggcgaaggacaacctgtggagggccagactggatgccgtcctgatgcacaggatatggggttcccttattttcctgggcatcgtttatattattttcttcctgagcttcgctatcggggatcctctggtcaggctcatccagacgggtacccagctgttcagcgtctgggcctgccgcatgctggaaccgtggccccgccttcaatccctgctgggggaaggcgtggtaggaggcgtgggcggcgtactggcctttctgcccaacgtggttctcctattcggggccattaccgttctggaaaacagcggatacatgatgagggtttcccgcctgatgagccgcatcatgaaaatcatggggttgaacggcagcagctttgcccccctcctgctgggattcggctgttcggttcccgccattctgtccaccaggagaattgaaacgcgcagcgaccgcctggtcaccatcgccgtgctgcccatgatgagctgtgcgggccgcctgccgatctacatgatgttcgtctccgccctgtttccctcccgcctgcaggcccccgtgctgttcgggatttatgccagcggcgtcctgctggcgctgtgctgcgcccggcttctgaaaaacacgcttttcaaggcgccccagagggattccctccaccacatgaagcgcctgcgcctcccctccctgcggaaggtgggcatcctgatgtggtcgcgggccttcatgtacgtccggaaagcaggcaccttcattcttggagcctccatcatcctgtggtttctgaacacctaccccaggccggaagaagacacggcgccgacaaacgcagcggccatggaacattcctatgccggacaaataggccattggatggaacccgtcacgcaagtggccggatttgactggaaaatcaattccgctctggtaggagcctttgccgccaaggaaattttcgtcacccagatgggtatcctttatgcggtggaagacggaaattcgggcccggctgcccagcagacattgaacacccgccttaaagccagctacacccctctccagggcatcagcatcatgatattctgcctgattgccctgccctgcatcggcaccgtcaccgtcgccaagagggaagcgggcacctggtggttcgctctggctcaattcggcggattgaccctcctgggttttgcaacggctacgctgatctaccaggcagggctccttctgtaagggccagccataaagaaaccggaagcagggaataccccccggaggaagaaaaaatgaacctcgtggaaaaagaggcgtttacgataaacttccgcaagttctcctgctctacggtcaagttatcacaacctcgccatcatccggccacgaaagccgcagcataacaccatgcatggccgtgcaagcctcccctccgcaacaatccggaatcagtatgcatcggctgaagtctttcctgtttttttcaagccgcccgggtatccttttccgtttgcagagggggggaacaacctgcggcaaaaaaagatcatgcagccatttccggaaaatcaatgcccttttgacagggagtaatcaaaaaaggggcaccaattatccattcggtaatctttgccctggatatgggccttaacctcatctccctgggaatccctcagacagccccgcgcccccgtccgcggaccggaaggacggtgttcattaatcgtcatcccatagcgtagacgccctttcctcgggtccttctccgtcaacagctgtaccgcattcttccccaccagccggacagacttgatggcaatatcctctccctcagcccccacaagggaaaagccataattgccaggatcgtcaaccgtcttcgtgtccagaaccaaaggggggcagggagcataaaatgccacttccaccgtccaaccctttccggacttcctgattttatgggtcaggggatgcacgggtttccagtccgccccatccaacaggactttcttcatgacatagcccacatactccccataaaggcgggacatgggcgccgtcaaatggactccgtcgctatactcgaaatgatacatcggggtcgtcatcacataccggctgtccttctccaaagccatctccagctgttccagggcaatagccggataatccgtaggattaaactgataataattcaaatgggaaccaacctgatagccgaaacagaccacatcgtttttctgcccggtcacggccctggcgtcatgatttatgtccctgatcagcttttccattttttcccggtaccattccctcgtctttctgtcctggtgatccgtctctccctgggtccagataaacgcaggcatggaaagggtcttcccttcccggtcagccagtattttggcggccttcaaatcatccaaaatgcggttgtaggctccagttcccctgcccagggaaccaaggctcgccccacccactcccgtcgcagaacaaatcaaccggatacgggaagccgtaacgggagaataatgctgcatcaggcggaacaaacgacaggcagccccggatacgggagtttcgccgcgcggaccgttcactccttcctccagaggaaccagcatcttgcggtcactgccgttctcatacgctctcacccctcccctgaacatatacaagcccccttcctcctgcttttccgttacaacgggcttagccgtccagcccacagaaagggattgaccgtaagaagttaaataattccaatccgcccactctgttttccgggaagcacagatggatgcggaagccgccgcagccatgtggaaagcaagcaaaatcaaggtaacaggaatattcatcagataattcaacggactctgtccgtgaacatacgttagccgttccctctttttatcaattcctgaacacaaagctgtccatccattgctgcagtaccattacgccaggaaatacggaattgccgttccagccgggtccacgccatgtttcggtaccatgccgtaccggcaggaaaacgcattcaatataccaacgggatttttcatcctccaaaagaaaggcggcagaaacattctccgtattgaataaacaacatgaaccatttcccgtctatcaacgccatatccgcctccatctgccttctgggatgcggactcgccctgcctgttttctcccaacagccggaaaaaggaaaacccgatgccgcccacatttccaaaacaaaagctgactggtggagccagaggcacgccctgttaaagcagaccctggcggaaacaccatgccaactgctgtttatcggcgattccatcacccaccgctgggaaaccgacggcaaaaaaatatggtctcaatatttttccccctatgctcctgtcaatttcggcataggaggcgacaggacggaacatgtattgtggcgcattgacgattctgcccttaaaacgcctcattccccccaagtatgcgttatcatggtgggcaccaataacacagggcaatacaaaggcaggcagaccccgcaggaaacggcggagggtatccgggaaatagcttcccgggtccatcggctccaccccgccactgaaattattcttctgcacatctttccccgggggaaaacggcggaagaccccctgcgcatccaaaatgaaatgatcaacagggagctggacaaaacaaatatgccgagagtccatgtcgtcaacattaattccgcattcctggacaaggacggcactttcctgccgggaattaccggggacctcgtccaccttacagaaaaaggctaccgtctctgggcggacgcactgctgccggaaatcaaaaaatacatgaagtaagtccgctacccccttccgcccggctcaacggccaattcggcctcatctgcgcagaagcggccagccaatcatggttgtcactcccgcacataaaaaaccggagggattattttccctccggttttcggatacggccgttaaaaccgtttaaattgtcttaatcacggaagagtcgtcatcatccctgtcctcggcagaagcggccttcctggtgggaacaggcgtcttcctgaccttttccagagccttgtccaccgccgcaatcaccttgtcttccccggtcttctgactggacaactcattataaatcttttccttggcctcataatcggccttggctgccgcatcgccgggattggccttaaacttgtcctccgccttgaacaaggcctcctccgcagcctggaactttggttccaccgcgtttctctggtcttccgcagtctgcttgatgcggcccagcaggcgaatcacatacgggcggttgctgagcctcttgaatgcggaaaccagaaactggcggcgttcgctggttttggcatccgcaataaggggatcaaacaacttgagcgtggcgttgtcatcccggtcacggtccacggagagtacgcggagaatggaatcatgggcctgggaacgcacgcgttcatgcagggattcgtctttccaggccttgaacaggtacggaacggcgtcatccgtattccagtccccccaggcggtaatgatggcaagcgcctttttggtatcctccttatagctcttttccatcatgtccagcaccttgggatcaccggtgcgggccagcagcttgtagagcattttgacgttttcctccggcatatctttctgatactggagcagtttggaggaaagcgccttgcgcttggctggaggagcttcgtcaatcaggtagcgcgccgtacggaaagcggaggaaatcaaatccggggaagcatccttcttctggaggatcttcatcacgtcgtcaaggtcgtccagcttcatggcaaaacgcatgtacttgagcaccacggcctgcttgtcctggatcttcttattcttgctttcgctgatggaagcgtacaggtctttcagcatgtcgcgcatggcggggctggaagacttggccaaaagggtcaccatcatggaatatttttccttactgtacctgccgacattttttttcatgtcttccaccacctggcgggcaatgttgtcatccatctgggccatgatggaaaccaggtgggcggcgccgggccagttttccctgttgcccttgactcctctcacattggcgagcagcagagcggcatcctccgcgtcgggaacgactttcacatccgggacacggctgagattcttggagtcaaacagacggctgcggcccagtttcccgccttccacgaccagcgcattcaggcgggcgttctcaccttccaccttttctttcttgctgttggtgctccatgcataaatccctacgccggcagcgatgacaaccaaagcgcataccccataaataacaccccgcagcagggatttggatttatccacggaagcggccatatcccgggcggattccgttccggcgggaggctgaataccgccgtcgcccgccggaggagcgccagcggcaggggaaactccctcggcggccacaggctggggaaccgcagcgggagccacggaagaagctggtgctgcccccacgggggattttaatactttcagcttgggaacggcgctttccggagcggcggccggggatttctccgccgcagcgggagccgcggccgtcttgaaaactttcaatttgggagccccccccgcaggagcaggctccggaacagacggttccggggtctgcacagccgcaggcgctacccctgcggcctgggccagagcagcggcctgagcctccgccagggctttctgggcctccgctaccttggcaagggcatcctgaatctgtgcgtccacggaaggctcgggctgcggagcggaagcggcttcctttttctccaactccgccgcaaggcgcgctctttcctcttcggcagctacacgggcggcctccttttctgcggcaatgcgcgcggcttcggcagcctcctgctccgccttgattcttgcggcttcctgctcggcagctattctcgccgcctccttttcggcagcaatacgggcggcttcctgctcggcagccgctttttccgcagcaatcctgtccgcctccgcctgttccgctgcgcggcgggcggcttcctcctgctcctgagccagcttggcctgcaactcaggagtgagaaaacgcggcttgacaacctccacgccttccgcggcgggagaaacaaactttaccttgggtgcggccgcaggggctgccgttaccaaacggcgtcgcaatttgggaggttccggcgaagaaggggttcctgtctgatcggtcatcgtgataaaatggctgggaaattggagtgattttatacgattccgcggccccctgcaacctcaaaataccgtctggaaaacgggcggggaacagccgccgtgcgtggctcaacaggcagattgcgaaaaaaggcttcacccgggatataacatggaaaagcgtttaaatatcccgcggattctcccgcaaaatcataaaaaacacaatatgttaacaacaacaatcatgaataaagtaaagcgcccgtaatagaacttcaagaatacgcaccagtcatttaagaatcctcttaaaaaatgttataacacatatacttttttcttgccagaccaaggatgattagttaaataaacaaccactcgtcaacatcatgaattccaacgacagtaccaaaaataagaggcgctacacgcctgaagaaaaacaatccgttcttgatttcattgctgaacggaaaacccaaaacaaaaggggtgcccagaaagaagccgccgaacgcttcggcatcagcacggtgaccatctcaagctggatgaaggcatccaaggccaagcgcggccgcaagcccggcaccaaaaatacaactgctcccaaaacacagcctctcgcagccgcccaacccgccgacctgcgccgcctggcggccgttctggaagaaatcgccgaccttgaagcccagacagccaaactcgacgccctgcgcgctgaagcggaggaactcaagaacaggctgactgccaagcaggcctgattgcttttattccttccttttccggaaaaccggcttcccctgacaagggaagccggttattttctttacggagatcgcgcttgcccccccggaacaattcctttaatatccgccgtcgtgactcaacccgcccacattgctcccgcgagtcagtctgtggaaggcatgtatgccgactactttctggattacgcctcgtatgtcattctggaacgggccgtacccaagatcaatgacgggtttaaacctgtgcagcgccgtattctgcacgccatggaccgcctggacgacgggcgttataataaagtggctaatatcgtgggagacacgatgaaattccatccgcacggcgaccgttccattgcagacgcgctggtggggctgggacaaaaagggctgcttatcgacacgcaggggaactggggcaatattctgacaggcgaccccgcagcggcttcccgctatattgaagcccgctttacctcctttgcgcgtgatgtagtattcagccccaaggtcacggaatggcagctctcctatgacggcaggaacaaggaaccggtcagccttcccgtcaaatttcccctgcttcttgctcagggagcggaaggcatcgccgtggggctttccagtaaaattcttccccacaacttcaatgagttgattgaagcctccatcgcctacttgcgcggccagcccttccagcttctgccggactttccgaccggaggcgtgatggatgccaccaactaccgtgacggagaacgcgggacgggccgcgtccgcatcagggcgcgcatcctcacggaatcgaagaaacttctccgcatcacggaaatcccgttcggcgtcaccacggaaatattaattgattccattgtctccgctgcggaaaagggaaaaattaaaatcgcccgcattgaggacaatacggcccagcatgtggacatcctggtccatctcccggccggagcggatccggagcagacgaggaaagccctgttcgccttctccgcctgtgaagtcagcatctccccgaatgcctgcgtcattgtggaggaaaaacccaggttcatgtgtgtcagcgacatcctgcgctacaatacggactccaccaaggaaatcctgcgccaggagcaggaaatccgactcaaggaactgaacgaggcgtggcaccaggcaagcctggaaaaaatattcattgaaaaccgcatctacctctccatagaagattccgaaacgtgggaagaagtgctcggcaccattgaccgggaattgcagccgtttgcatcccggctgcgcgcccccattaccagggacgacctggtaaggctgacggaaatcaaaatcaagcggatttccaaatttgacgctttcaaggcggaccagcacatccgccagcttgaagaggacatcgaacaaacgcagaagaacctcaaccagcttaccaaattcactatccgctggtttgaagccctgcgtaaaaaatacggcgccgcctatccgcggaaaacggaaatttcctccttcggctccgtaaaccgcgcgcaggtggctgttgccaatgaaacattgtatattgatgacgaaggctttgccggttacggcgtcaagaagggaaaccctgtctgcaaatgctccacgctggatgacgtgttgatcattgacaatgcaggcgtgctcaaaatcgtgcggattcaggacaaatttttcgctggtaaaaatcccctttatatttccgtcatcaaaaaaggggacgaccccgtgttcaacctgatttaccgggacggaaaagacggccccgtgtacgccaagcgtttccgcataggagggttcaccagggacaaggaatatccgcttacccgaggcgcaaagggaacgcgcatcttccacttctccgtgcatgaaacggaggaaaacagttcccagataagcgtaaacgtttatctgaaagccgttctgaaactccgtaacctgatcaggcccttccacttcgcggacctgagaatcaaaaaccgcggtgcccagggaaatatcattaccaggcatcctgtggaacgcgtctcccgcatcatgcctccggccaagtccggaaatgaggaaacggaagggccaacaaccgctccttccgcaacagcggaacggacggaaggctcacccgccccctccgcggaaacgctgcatcctgaaacagccccacatttggaggaaccgcctgccgatccgccgctggaacagggctccctgtttgactcctgaaacgttttcaatctcttaaaatggaaatatccatgcctgactatccattttcggcttgccacaacgggccatcttctgtagatatgggccacctcattaccatgccgctttagctcagtggtagagcacccgccttgtaagcggacggtcgtcagttcaaatctgacaagcggctccatcataacccgctcaaggtcaacccttgagcgggttgcttttatgaggcgtgcgccattactcgttcccatgaatttccggcgtgccgcttttgaacattcatcatccattcatatctccggcggaatgcagcagccgcaggaagcaaagcggacacaacatctggcaagaggccattccacccacgggcatccccgtcaacttccggcagcgaagggccattcccggagcgggaagaaggttccgttggcgataacgccgcctcagcaagccgtttccccccttgaatacgcctccattgccatttcgaccaagggaaccatgattcaagccaatggatactacagaaaaaaagatggccgcggctatcctccggtttgaagacagccgcgttaccgggccggattccctgcgcgtttcccgccttcccgccgccgacaagggcggcaagtgggaggtttgcggcatttgcgacggcattgaaccggccgtgtttaacagattgaaggccctgttggatgccggaaggcgtgaagaggcctgggaaggttgcctgcaatacgtcctggataataccgccgccgtgcgttcctggctgggttctgacgcttttccggccacggagtttatgttgcgggaccattttttcaattccgggagcaggaataccgggaagattttgcagcgcgcgctgaatgtccacggagccgggcttgtggtggacggtatcccgggaaaacaaacccggcagatgttgaaaaccgttctcgcccaaacgggagagtccgaatttctctccactctgaacgaacggcgcaaatcattttaccattcttgcaaacagttccccgtgttcggcaaaggatggctgaaccgcagcaatgaggcataccggttcgcacaatccctggtttagggaagttcctgcaaaaaaactcccggaaaaggagtgcaggagaattcaaccattgttgcagcaacctgtttccatgcgccggatgccatgaaagagcctccgtgcggatgtccgcacggaggctctttcattaacacgatcaggaaaacgcttcgtcccccacaaacgctcccagcagacggcaaaaccgggaagcaggtaattttaccaatctcccgtccccccgcttgccatgctgggtcagaatccagggcagggaaagaatctcccgtttataagccagcaattcccgtacatttcccgccagaaaatggagatgccaggcatcacaccggaccggctcaaaccggaagcggacatcgacaatctttccgaaaggtgcggaagaatccaccctgcgcgccatcaggacaagctccggagtacggacatagacatcctggcggcagccgtcttcctccatttcctccaccctccggcctgcagccagataataggaaaaggcggcagataaagcgttcatacccagtttttcttatgccgcctcaaccgctggcgcaccggacgattcccgtcggaacggctcctgaagaaccgtttttccctaaaaccgccggagcaaaagatcggacggcacccagtcatttgccctgccggattttctggataaccggaggcatctccgttttcggctgtttctggaagcaggacaaatgccccggttccagcaccaggcaggaatcgtccctgcatatctccgcccgcgctgcagtcacgtctacggtatacccgcagccggagaggagagaagacgccgcataagccgctccggccagaaccacccacaagagacgttcccaccaggtcaatccgggacgtgttccgcttttttcataagcgtttttcatgccctgttttcctgcctccagagccgctttcttttgttcttctgtcaaattgaagtccatttgagagagggggtgaggggttccaggaattctcgcgcatgttgtgccgcaacggttccgcgggaaaaaatggcgccgcggcaggactgtttattgctattcattttgttcatttttttgttcattgcccggaaacgggcctttaccggcatggaaccggcggtgacatcagaccgctcccggacacagacatccttgccctgcccttggggcgggagcaacacgcctgatacgtccgggaacaaggaatattccgccagagacaaacgccggaatttccgccgcggataacaaataccctgttgaaaacggaaccggttcatgctagtctcttccctgctatggcaaaaccggctctggggaaaggctttgacgcccttatcaatcaaaatctgtctcgtgaatccttggcggctccccaggcgggagacgttgtgcatcaactatcccatgccgccattattcccagctccctgcagccgcgcgccattttcacgccggaacaactggcggaacttgtagattccatcaaggaacacggcatcatccagcctttaatcgtccgtaaaacgcaaagcggcaaatatgaactgattgccggggaaaggcgctggagagcctccggcatcctggggctgtccaccgtgcccgctatcatccgggaagcttccgataaggacgtgctggaactggccctgattgaaaatcttcagcgggaaaacctcagcccgctggaagaagccgccggctacatgcgcctgaaaacggagttccgcatgaagcagggggacatcgccaagcgcgtaggcaaatcccgcgccgccgtggccaacagcatgcggctgctcgacctgcctcaaccggttcaggacatgctgggcaatacctttatcagcgtagggcatgccaaggtacttctctccctcaaaaacaaggaccagcaaatccagcttgggcgcgacatcgtcaacaagggctacaccgtccgccagacggagaaggctattcagaagatgctcaacccgccggagccggctcccgttaaaaaaccgtcctcccctcaatataagaaaatttccagcatcctcgccaaacaattcggtactccggtgaacatttccggccagggaagccgggggtccattgaaatcaccttctccagcaaagcggaattcatccgcatccttgagcttctgggccaggatgaatggcctgattccaagtaaacttcctccccctttttccatgacgccccgcatcggacttctcctgttcacggccctgctgatgcagtgcgaaaaccccgtggaaacgcccgtgcccggtaaggaaaccgttcccgcgcaaatccggcaaacggattgtttcaacggaggaaacgctctgttccacgctgcgcggataacggaaatggggaaccgggcttcaggcactcccggctaccgcaggcagatggactacctgaaggaggaactggccaaatgcggctggacctgccgggaacaggcttttgaaaaggaaacgccccagggccccgtccggttcgtcaacctgagggcccgttttggcaaggctccaaacttcctggatccggttcggggcctgctgacctgccacattgacaccaagcggggcatcgacggattcaccggcgccaatgacggggcatcgggagctgcggccattctggagacagcccgcattctgtccggagaccccgcacgcgccggaaatttggagcttgtgttttttgacggggaagaaagttttgcggaacatatggacagcgacgacggcctgtacggctccaggcattacgcatcctccatgcggcagccgctccccgaatggatgatcaatctggacatggtggggcggcagggtaaaaagatacgcatcccggccatgacgccccaatccatgtaccgggtttattcccgcgccatccgtgaactgggttattccccagaggaatggggagtatccggctatgccatcctggatgaccacgttcctttcatggagcgcggcgtggacacgctgaacctgattgacgacttccaggacggcaactggtggcacacctccaaggataacatcggcattctgggcgaaaaatccttccagcaaaccggggaaatgacccttcacatcctccggcaactgcttcccggcccgccctccacctgaccaggcagctctgaccctccaattatccctgtcccgccatgtccttcaactctccctggctgctgtgggctctctttgcagcctccgttcccatcatcatccacctggtcaaccggtggcggcaccgttccgtcccctgggcggccatggaattccttctccgtgcggccagggaaacacgtggaacgaaaaaactgctgcactatctgattctggcgctgcgcgtgatggccgtggcggcactggtaacggcctttgcgcggcccctgctcggaagctttttcggctgggggagctccggattgaatgaagtcctgctggttctggatcgttccgcctccatggatgcccgtccggacaaaaccagctccctccgggatgccatccccccgctggtggaatccacgttcgcgcagctcggccactgccgcctgtccctgcttgattccgccaccggaaccgtgacccagattcccgctccggaagccctggcggatctgactgtaagcaagacaacggatggaggcgcggatattccggcacttctgcaaaaagccatcccgtacctggaagaatccggcgcaggaaagacggaaatctggattgcctcggacatgcaggcctcttcctggaagccagactcccctctctggcccggtgtgcgccagaggctggccgcccttcccctgcccccttccatccgcatcatggccctccgcgacaggccggaaagcaaccgcggcatcagagtccggcaggctcaggtaaataacgggaaactggtgctggacctggaagtgctgcggcagggtttcaaccccaaccagccggaggacgtgccggtgcagctttccgtggataacgcctcctccgccgccacgctgcaactggcaggggaaaacacctccatccggaaagaaatccccctgccgcagggcaaggaatccggcttcggcttcgttgcgctgcctcatgacgacttcatcagggatgacatttccttcttcaccttcgcccccaagcctctcgccaacatcctgattttcggtccttcgggagaagtggggaaaaccctttccctgatgtccgcccctcccggcctgcccggcaggaaagccacgatgcccggcaatacgcgggaagctcaggctaatctggcctcccagtccatggtcgtctggtacgggccgccgccgcgcgcggaaatggaaaaaaaactccagacattcattgaagaaggaggaatagcccttttcctgcctgacgacacggaacacggaacacggcattcattcctgggcgtttcctggggcgcgacggagacggctccgtccgaacaatactaccgtctggaaacgtgggaccggcaaaggggattcctccgcgacggttccgatcagacacccatccccgccaaccgtctccgcgccgtgcgtagaaaaccccttctgggcaaataccgcactctggcctcctgggatgacggttcctgcgctctggcccaggtcagggccggaacgggatccgctctgttcctgggaacgctgcccagatattcctggtccaacctggcggacggccacctgctgctccccctgctccagcgcatggcggaccggggggcggaacgcttttccacctccatttccctacgggtgaatgacgcctccctgccgcaatccgccacggacacccccgtgcgcctggataatgcccagggaagccacccctccggttctccggccgatacggcgggggtgtaccgactgggagcacagacctacgccgtgaaccgcccctggccggaagacatgcctgaccagattacggatgaaaaactacaccaccttctgccggaagcttccatcagttccatgcagagtgcagaggaagccccctccctggtgcaggaagcatggaagctcttcctgttcttcgccctcgcctgcctgctgatggaagccctcctgtgcctgcccggccagacggccaaacgcccctcccccaccacccgtccatgaacctgagccttcaacctactgcgtcaagcgtcatcctgaccgccctggttatggcggccggcatctggatgagctatatcgcctgcaagcgcaaccgccggccgctgacattcaaactggaaattcttcgcctggcaatccttggcttcatttgcttcctgctcttccagccggaatggatcatcacctccgccccgcaggaaaaacccaaggtttccattctggaggaccgctccggctccatggaaacgcaggatgttgaaatctccccccagcatgtcgtcacacgcacggcctacgtgcaggaactgctcaagggcaacagtacggaatcccttaaagacacgcatgtagtggaatacgcctccttcggcgcgccacctgcgccggactctccggattatgccatggccggcacagacctagccaagccgctggaggacgccatgcaatcctccgacaacctccgggcggtcatcatgttcacggacggcagccacaacgcctcatcctccgtgctgacgcaggcccagcgcatgcgcaccaggggcatccccctgttcatcatttccgcaggcagcccgtatcccctcccggacctggcccttcaggacgtgaaagcccccacttacggcatcatcggggaaacggtgcaaataccctttaccattaaaagcacgctgggcaaggaaacgcgcaccacgctcatcatgacttccagggatacaggaaaaaccgtcacccgcacggtcaccattccggcccagggggaggtatccgacgcggttctgtggaaaatagaaaaagaaggggcggaaacgctggaactcaaactcccggtccagccccaggaacggatgcacaataataacgcctcttccttcagcatctccggcaggagggaatccatcaaagcactggtcatcgataccctgccgcgctgggaataccgcttcatccggaacgccctgtaccgggatcccggcgtggacgtgcataccctgctctttcatccggaactggaagaaatgggggaaggccccgggtacctggtcaaattcccggacaggatggaagacctggcccggtatgacgtcatcttcatcggagacgtggggctgggctccaaagggctaacggaagaacaggcctccctgctcaaaggcatggtaaaaaaccaggccagcggcatcgtcttcctccccggctaccagggcaggcaaatggaactcctgaaatcggaactgggggacctgatgcccgttacattcctcaacaccaagccggaggggacaacccagccttccccatccccccttatcctgacgccggaaggccgcggctccctgcttaccatgctggcggatacggagggtgaaaacgaagaagtatggcgcaatctgccgggcttcaactggtacgcccccgtggaacggcccaaagcgggaagcactgtcctggctgtgcatgcggcggataagaatgcctatggccgcattcctcttattgtcacccagtcctgcggcaacggaaaagtcctcttcatgggaacggattccgcctggcgatggaggcgaggagtagaagacaaataccattaccgtttctggagccaggtggcccgctggatgagttaccagcgcaacatggccgcaggggaaagaatccgtctgattcccaccccggaacggccccggccgggagacacgctgaccgtcaccgccatggtctccgacaaactgggggcccctctccagaatggagaggtttttctggacattacaactccggaaggaagctccagccgcgttcaaatggacactatggaccatacatggggctcctttaccgcctccgtcaaaatcaaccgtcccggcacctggaaactcactgcttcatcctctgcggaaccggataaatccgttacgcttcccgtcatcaccatgagtgaaacgctggaaaaaatcggcagccccgtcaataccgcgctaatggaggaaatgtcctccatcacacgtgggcgcatggtaaaagctgaggaaatacagcggctcattaaggaaatcagggatctcccggtgccgccgcccatggaaacgcgcatcctgctctggtgcaacccgtatacgctctccatcctcatccttctgcttaccctgttctggatagggagaaaactcaacggcaccatttgagacgcaggtttcccacacctccccggcaggagtttttcttccctcccttcccgttattttcccgcagactccctgtccgcggcagcagaagccggctgagaaaatctcagcctcaatcccatttttttccaggccgcggccatttccctctgtacatcctccggagtcttcccatccagcaaaacagcacgcgccttcccgccgccctccgcatcacgaaccctcaaatagcttctgaggcactccgcctttccgctcccctccaggtgactccagtaaaccatccacaacaaatcggcccaatactgaagcgttcctcccctggaggaaacgccatgctccgcggcggaatgtgctgaatccctggacagcatgtccgccagggccggcagagtttctctgcccgtgcggacggcgcgcggaaccatcgcggccagcctttccggaatcttccggaataccggcgcttccctctccatgggaagaaaagccatgtacgcggaaaagccgtccaccagccagtgatcccaatccatggactgtgccgcccagtgcgtgacggcaaagcgcggatccagttccggcttcagcagctttcccttcttatcccgcaacagcagagccgtgaaactggtaggggaaaacttgagatgtccgttccgcaggcccggagccctgttgaaatcctcttcctggaaacataccctcaccagatacttgcgggagggccggcgggccaccgccagattcaacggaacagctgccagggcggacagaatggtttcaaaacgccgggcaaggatcatacgctccgcttccggcagctttccaggagactccatgatgaaatgatccgtttcatacacactcagctcctccgtctcctgcacggttttcaccagcaggaaaccgggaacaaccaccctctccggccagggagcatcccaattcggctccaggggaacgtaccgtctgccggaatccccctgcacaggaggattctcagcccccacatccgtatcagggagcgtcccgccagactttacccattccagaatatattcctggtcggctccggaaaaaatattcttgggaacagccaccacgcgaccatcctgaagcttcaaatccacctccgcatcacggacggccaccagcacggctacgacggtagcgccccggtcattcgtccaaatgcgcgcccgggcgcttcccgccaggctcagccctgccaatacggacagaatctttacaggtaaggtcatagggttccctttgcccgcacaagctaccacattgtcccgtggacgcaaccctttttccgtctcccgttcttccggaacaggttccttgaaaagaatatggggaaggaatgtatcatcgcctgtcccccggaggggttgacacactccggcaaaacccataatcttatggaagaaaggaaaagaaggcatgcatatcagtcccctcagaaaaaacattccgctgactgtcgtcaccctggcggccttgggcatcatgttcttcctgtttttcatgcatccctcccctccggaagaatcattggaattctatgcgccggacggcaatatcgcgggttccttccgggtggagatcacgaatgcgccttccaaccccgcctatacggaagtaaaaatcattccggaagacatggaatccttccaacggtttttggcccagttccgcaacaaacccgttactgcaaaagttccctcccgcggcagccacatcattgttccgggccgggacatgcaatacgacggagtcctgcgcctgaccggacattgagagggcaggcaaacagaggccatcttaaagttgttctccctttcccacgtccttcgcccacttccgggccaggaaggaacaaaccatcaactggagctggtggaacaccatgatgggaatcaccagcagcccgatgggggctccggcaaaaatcacgttcatcatcggaatgccggtagccaggctctttttggagccgcagaaaataatcgcaatgcggtcctcgcgggaaaaacggagcctgcgtgaaaggaaagccgtcagccacagggccgcggccagcagaaggccgcaaaaagccagcacctccaccagggaaagccagggcagatttttccatacgccgttaatcatcgcatggctgaatgccgtgtaaataaccagccagatggtgctgtggtctgtccaggaagtgaggttccggtgcgtgactacccatttgccaatccagcgctgggcgaactggccggccacaaaaggcaccagaataatatagcagatgttcaggaaagtggaaaaatccacgcccccttcccctccgcgggaccacaccagccccaccagcaagggggtgaggaacacccccagcaggctggaaacggaagcggagcaaatggccgcggccacattgccgcccgccatggaagtgaacgctatgctggactgcacggtggaaggcagcatgcacacatacagcattcccatgcacaaatccggctccagcacactattccacaagggcatgctgaatatacccagcagggggaaaataacaaaggtgctcgcagccaccagcccctgaaggcgccagtgcatcaacccttcccatacggaacggcgggaaagcttggccccgtacaggaaaaaaagcagaacgatggctgcatcgctcaggcggctgaacactgtatcccatactccggaacagggaaccagaattcccgcgcccacactgacgatgaggccgatggtgaagcgatccaatttggcaaggaatcccggcatggagaaggaaaaaaggtaaataccgcctccggcgttctatttgaaacgcacagcatgcttcttgctcaggcgcaggacgctgcccggagccagttccaaaacggcggaggggtctgtcattttcacatcattcaactggatggcgccgggcgtgaaatgctccttgcggagaacgccattggattttttcacctggaaaacattctcaaacaggaaggaaaccagggccagggcattcatgccggcaggcagggaggcaatctccacttccggcaaatccgcggcagccaaatccctcttggaaaaacgggtttcccagtcagaacgcgcggcatccgcagcggcggaatcatgatagcgtgccgtgattttccaggccaggagctttttggcttccatcggatgcaatcccatgtccctcttctcacccagcagcaccaggtaatagcggtccatcagttcgtcgctggcgctcatcatcttgccgaacatcatctccggagcctcatccacgcccacgtaattcccgtaggacttggacatcttccgcacgccgtccagaccttccagaagaggcatcgtcatggcgatctgcggcagcatgccttcctccttctgaaggtcacggcccaccaggatgttgaaaagctggtccgtcccgcccagttccacgtccgcacggatttccacggaatcccagccctgcataatcggatactgcatctcatgcaggcgcacctccttaccgccctccacacgggccttgaaatcctcccgggccagcatctgctgcatggtcacgcgggaattaagcttcagcacctcctcatacgtcatcttgcggaaccagtccccattatacacgatctccgtcttgtcacggtccagaatcttgaacgcctgcttggtatatgtctccgcattctccagcacctgttcacgggaaaggggggggcgggtcacggaacggccggaagggtcgccgatcgtggcggtgaaatccccgatgagcaaaacagcctggtggccaagttcctggaactggcgcaatttctcaatagccacggtatggcccaggtggatgtccggcgcagtagggtccacgcccagcttcacgcgcagggggcggcccagcttgaggcgctccttcagctcttcgcggctgatcacgacggcggtaccgcccatcaatatgtctaattgctcatctatagtcattgatctggcgcatagagtgccgggggcaccgcgccttttcaagcctatatcctgtgcgcggctcatcgaacgcggccaagagtcccccgccaccggtcccgacgtgagggaacaggcacggaatccattccgaaaggcggaataaacggcacgccgatgctggcattttccccgcatggcccttcctcccgttccatgtcacggaccagccctgctcccttccggatgcagagaaacgtccccgcgaatctacagaagctggtacaggcggggataggaagcatgattggcggttatgtaatgcgggcgcggcttggggaccggctttgtccgcctttgatcccagccgtcacggtcatgatgataattatcatggcgcggcggcccggaacggtaatcatcacgatcgtggtggcgatgatggcagcctgcggccagaacgattgaggctgctgcggcaaaaacaggaattatgttcatcttcatctttcttcagggtaagacagtccggagggaggaatgcgaacggaaaaagtctgtcacccgaataaacgctccctgttgacgaagaaaacggctcccaatacacataaaaacgcccacaggtaatcccacttccatttttctccgatgtagaacagggcgaaaggaataaacacgcacagggtaatcacctcctgcataatcttgagctgggccacgttaagcccgcccgcactgcccaggcggttggcgggaatcatgaagcaatattcaaaaaacgccaatccccagctcatcaggataatcatcagcaggggcttgccatccgccccggaacccttcttcagatggccgtaccacgcccacgtcataaaaacgttggagaccaccagcatggaaatcgttaacgcaatcttcatgatttttacttaaaaacatcagtccttggaggacttgggatccagggcgtcccgcaggccgtcccctaggaaattcagcgccagcagggtagccgaaaacaggagcgccgggaacaaaagcaattccggacttacctccatgcggtccgccccttccttgatcagcgttccccatgaggaattgggagccttcacgcccagccccagaaaggacaggacggcttccagcagcatgatgccgggaacggccagcgtcgtgtacacgatgacggccccgaacaaattcggagcaatatggcggaacagaatcttcatgtggccgatgcccagggaacgggcagcttccacaaactcctgccctttcagttccatcgtctgcgtccggacaatacgcgccagcgtcagccagcccaaagcgccgatggcgatgaacaggggaatcagcccggtcatggggctcaccatttccacagaccagcccgtcatgccggaaacccactgcgtcagcctccgggccggctcctccacggacaaggaaaaaataatcaccagcacaatgaacggcagggcaaaaagcacatccaccaggcgcatcatcagggcatccagcctgcctccggcataaccggaaaccagtccgtacgccacgccaatcaccagggaaacgcccgtagcgaccactcccaccagcagggaaatgcggccgccgtacaggacacgcgccagcaggtccctcccaagctggtccgtgccgaaccaatggtcccaggaagggctttccgcaatccgggacaaatcctgcacattaggatgaggcagccacggcagcaggggacccagaaaacaggccgacgcaatcagcgccagcgccagcagggaaaacatggccgcccggttgcgggaaagacgcagaaaagcgtccttccacagggaggaaccctgttcctccatcctgttccatcctctttttctcatgattcctttctcaatctcgggttgacggccatttgcaccagatccacacccaggttggccgcgacgatcagaataccgtaaaacaagacaagcccctggatgaggaaataatcccggtccgtggttgcgttcacgaaatgctgccccatgccgggaacctggaaacaggtctccaccacaaaagaaccggtaatcatggcggcaaaagcaggccccagataggaaagggccggaatcaggccgcctcgcaaagcgtgcttccaaaccgtacggaaaggccccgcccccttggctcgagccgtccggatgaaatcctgccccagcacttcaagcatgccgccgcgcgtcaggcgcgccagatatgcggcattcaccagccccagcgtcagcgccggaagcaccacacaaccgggagaatcccatccggccacgctcaagccgggcacatgcatgcccaacgccacgccaagcagcggagccacgacgaaagcgggaatgcaaatgccggccatggaaacgagcatcacccaccagtccatccaccggttcttgtacagtgccgccacaattccggcgggaatccccgccagaatggaaatagccatgcctatgactccaagctggagggaaacagggaatgactggccgatcatatccgccacgctgacgccttccttcaccaaagacggccccaggtcgccatgaaccagcatgttccaccagtaacgcccgtactggaccaggggagcctgatccagcccgtaactggcctggagctgctggaggacatgctccggaagtttcttttcccccatgaagggatgccccggcaacaggcgtatcaggaaaaacgtcacagtttccagcaccagcaggaccagaagcccctgccccaggcgtttcataatcatcctggtcaaggcgcggcctccttcccatgttcccgggcgtcgtccaggctgatatcctcaaacaaatggttgtccagcagcagggggtgccatccccgtacctccggcctcttcaaataagaccgtttggcccaatacaggggaatcaccggggattcggaaagcatcagcgcttccgcacgggccagcagggccatgcgcttcttctggtctcccgtggcgcggctctccgccagcaggcgttcatactccggatgaaaccagcccgtattattgttcccggaggcggaaccccacaaatccagaaaactggaagggtccagataatcaccggaccatgaggaggaactaaaatcatactgcatggaattctgcgcgaacttgtaggccgtccactcacaggaacggatatccacatgaatccccagatgctttttccacatgccctggatggcttccgccatcgtcttctgaacttcgcgggatgtagtcatcagttccagccggggaaaacccttcccgccgggaaaaccggcctgggccagcagggaacgagctttctccggattgaactccaccccatgcggcgtcttgtatccggcgccgtccggcgtaaagccgaagcacggctggccgccgccgcacaccacgtcccgcaccagggcctcccggtctaccgccagggaaagggcccgcctgacccgggcgtcattcagcggcgcacgcgacgtattcagacggtaaaaaatagtcacgtaataatcatcctggcaaaaatcatcgccgccgcgctcccgggcgtaagccgtcatctccggaggcacgttgttggtgacatgaagcttgccgttgaaaaacatgcgggtttccgtaaagccgttcacggtgggaagaaaacggactccattcagccggacggcggaagccttccggtaccggggattgcggcgcacctccacataatcattgaaacggtgctccgccatgagaaaaggtccgttccctacggccgctccgggccgcgtccatttccccgtcctgtccagcatgccgccgtgggcttccacggcatggcggggaaccggaaaccaggtgcagtgaagcaacagcaggggaagctggggcatcggagaacgcagctccatctccagggtataatcatccgcggcgcgcacgcccacgcgggcttcctcccacaaatccggctttccggcccggacatcctccaacatccgggccgcaatcttccgcgctccttccttcggcatcccgtccggccactccatcagggtaggatcatcccgcagagcctccagctcaccggctcccataccatccagcctctcccaatccacccgggccaaaaccctctcttccagcccctcttccccagccagccgggaaccgggaccgcacagcagcaggctgcgcctgttccggttataggcttccgcattcttcagcggataaagcatgtccgcgtacctccctccaaaccccggatgaagcaggcggtgataggcatacacgaaatcatgggccgtcacaggaacgccgtcgctccacacagcgtccttccgcagggaaaaacgccacttatccgcctccggactgtgcgtccacgactccgccacagcgggatgaaaaacggcgtcatccctggaatccccgcgcagcagcccctccatgacggcattgatcatcttgaaatcggaaacggaagtggcgatgtgggggtcaaaactctggggctccgcattattgcccacgataagcacccctgcctcctgagcccgttccacgctcgagcgcgtatcgcatccggcgagcaaaagcatcacacagaacatcatgaacaggcgcatggcgggattttgtcaggtttccttcccgtacgcaaggcttcacgtcaagaaatacggcggcagaaccacaacgacctgagcgcccgcccagaagcggaaggctcctcccagaacctttatcccacccggctcccagttctgcggcttaacaatatattttccttcgtacgctcatgatacatataaaatttcatagaaagaaaaacgcccctcttccttactggtcttttacaaaacggagggggtttatcctgttctcccggttattcctcctctaaatttttcccatgtttaaattcaaacaccggacatcctgtatcttgaccgtactcgcggggataatctccattcaggtagggaatgccatcaccgtcccgtggctcagaccttatattaacggtgaagaagtggtcggaactacgctggaaagccgttacagcacacctgacggagaatccgccaatcctgtgatccggtgggaaaaagcagatgtccgaaacggaaaaaccgtagtggttcagcagggccgtgatgcgaaatcctacaccctgacggacaaggatgcaggaaaatatttccggattattgtaggctgcggaaccaaagacgaagctgccagccagtggatcggcccggtcatcacggaaaaacaggcggaaagcatcaataaccgtttccatcccggcaggagctaccaggaaaatgtgaacgaacttcaaaaggaactatctgaaaaacttcgaaacgccgtgtactttaccgtagatacggacaagctgcatggcgcaccctgcgcgatggccagaaataaacgaatccctctgcccaaagatatcagacctttccgggaaaacggaaaaatctatatcagccaaccctttgtacaggccattttcaacagggaactgcctgatgaaatcatggaggaagcagccggacagaaagcttatgaaataagcaatgtggccagggttctgcaactcaacctctggcagggagacaaggaaaaatctcccgtaccgaactttcgcatgcaacccatggcggaaggactggtgattctctctcctgaaaaagacatcttctctccagtagaagaccgtgacctgattaatgaagccgtcaacgggctcttcgatttcaaagccgataataaacagttaaaatggtttcgggatgccaaattcggcttgtttgttcactggaacccttcttccctgctggaacgggaaataagctgggaacgcaatgcggcgcgtcccaaagacagcgcgagcggtcataagaataccgtagactttgagtacgactccgcccaccgccgcttcaaccccaagcaatatgaccccagaaaatggatgtccgtcgccaaaaaaagcggtatgaaatacgccgtgctgaccaccaagcatcacgacggcttctctaacttcccctccaactacgacaccttcaccattgctgccaccccctacggcaaagacatcgtggaacaattcgcggcggcagttcatgcggccgggctcagactgggattttattattctggaagagactggtacaacccctactacctgaccgaccagcactaccgttatctggaatactacttcggccaagtcagcgaactgctcacccgctacggccaggtggatgtgctctggttcgacagcctgggcaatagctccctcaaccagtgggatccccgcaccatgatacgccgcatcaagcagtaccagccggacattctgatcaacaaccgcatgaacagcacccgcggaggcaataaggaaccgctgcccgatgatttgaaaggggatttcctgacgccggaatgcaagctaggccccttcaacactcaaacgccttgggaaagctgcatgaccgtggcggatatccccggcacccgctggacgggcaactggtcctacacatccaacgcaacaaccaaacccgtcgaaacctccatcagattcctgatcaataacattgtcaaggacggcaacctgctttacaacatcggtcccactccactgggaacatttgatccgaaacaggctgaaacttttctgtccatgggaaaatggattgctctctacaaggaggccatttacaacactcgcggaggcccctacagggaccagccatggggcggcagttgctacagagcggatcacaacggcaaaaaaaccgtttacctgcacgtcagcccgctgattgcccgacagggaaaagagctgaagggaaatacccccctgttcatcaaagatatcggggaaaaattcacgagagcgaccctcattgtgaacggtaccggaaacggaaaattcgtcaggcttgaaaaggaaggagaccagtacaaaatcactttgcccgagggtgtcacctgggacaggctggataccgtcatcaaacttcaataacccgctcttccaagaaaacagcatgcctttcccgcactctctcctagaccggatttttattaccggagaatagtgttgccgccacacggtactcttgcctatcccatatacccggcctgacggaaccggcatcaaatcctgcctttcgccactcccgcagcagaagcgccgaaaacacgcgccgcagaagaacagcgcccctcataagccacagtgcctccttttcatcatcccttttgagtaaccggagaaacagggggaaagcaaaaccccgcaacggcagaaaaccgttgcggggctgttttcccaaagcaagggaaaagaaaagcggctttaattatttgccctgcgcctttttggcagcgtcaatctgggccttgatcttatccttgttggcaagaatgccggccttgatgcggggggcctgcattccggcttccgttcccggcttcaactcggccaccttatccagaatcagaacggcgccgtccacgtcaccggtggaattcaggtaggtcccgaactccatcatcagcaactcctgctgtgtttccggcagaagcttgtcgcggtcgggatatgccttaaccacctgaagggcttccgcaggcgtagtcttgtccgtcagcttgccggcaagataattttgaacatctttccgttcctttttaagctggtcggagagggcgtctgcagctttcaggccggacttgtcatccttgtccagcttcttgatttccgctttcacgtcaccataaaaattgtccacatattcctgaggagccagcttgagcacttccatcagagcggcaactttcgcttcatccgtagcagccttggcgacattcgcttccgcggcattaagagcttccttgttcttcagggcatcctgcatggctttcatgacatcatccccggagcgccctccaacaaatcccccaaaaggcttgccggaagcgtccgcaaacacaacggtcgggaatccccgcacgccgtactgctgggcaagcttttcattggcggctttcatttccttggactgttccttgccgcgcggataatccagctccaccagcacgaaatttttctgcgcttccttctggaagtcaggcttgctgaatacgttggcgcggagctgcatgcaaggagggcaccagtcggaaccggtgaactcaatcattaaatcctttttctgttcggcggcctgttttttggcggcatccatatcggtaatccacccttccgcggcaaagcagggagcgacgcaggcggcaacaacaattggcagaatttgtttaatcatatctacaattcaatattgtagaatcggacagcccgcgtcaatcccctgttcaatcatttttagaaaatctccaaaagggtgcgtcttccgcagggaagtccgcatacggccgatgccggaaaaactgatgccccataggaagacggtgtcattattgaagcaaatcgggagttgcctttcagcctgttttcacttatgtacagaacctatcatgaacacggttttaatcattggagcaggcggcgttgggcatgtggtagccaacaaatgcgcccagctgccggatatttttcaaaacattcatctggcctcccgcacgaagagcaaatgcgatgccgttgcggaggacgtacgctccagaacgggcgtcagcatcactacccattccgtagatgcggacgacgtgcccgccaccgtagccctcatccgggaaatcaagccgcagctgctgatcaacgtagccctgccctaccaagatctcaccctgatggaagcctgcctggaaaccggagtcaactacctggataccgccaactatgaaccccgtgacgtagccaaattcgaatactcctggcaatgggcgtaccaggagcaattccgcaaagccgggctttttgccctgctgggttccggctttgacccaggcgtcaccaatgtattcacggcatgggctctcaagcatcactttgacgaaatccatacgctggacatcattgacgtcaatggcggcaatcatggcaaggccttcgccaccaacttcaacccggaaatcaacatccgggaagtaacggcgccctgccgccactgggaagacggagccttccgggaaaccgctcccatgagcatgcaccaaagtttcacctgcccgcaggaagtgggcacctatgaaatctaccgcatgtaccatgaagaaatggaaagcctggtcaagcacatccccaccatccgccgggctcaattctggatgtccttctcaccgaactacctcaagcacctggaagtgcttcagaacgtgggcatgacccgcattgacccggtcatgtacaacggagttgaaatcatcccgctgcaattcctcaaggccgttctgccggaccccggggacctgggcaagacgaccaggggaaaaacctgcatcggcaacgtcatcaccggaatcaaggacggtcaattcaaggctgtgtacatttacaacatttgcgaccatgaacaatgctttaaagaagtaggttcccaggccatttcctataccacaggggttccggccatgatcggcgcggaaatgatccttacgggcaaatggactggcgcaggagtcttcaatatggaacaaaatgatccggatcccttcatggacgagctcaacaggcgcggcctaccctggcactgcgtggaactcacggaagaacaggccaaaaccctgaaggtcaaccagcaataaatttcagcaagcgctgtgggcatcatcaaagccggacattgaatttccaatgtccggcttttccgtttccagcggggaacagaattccccaggacagcacgtcaacgcctgcctccgggaaaaagaaaaagccccggacggcgtctttccgcctcagtcataattttctggcgggaagagcaggcaggttgtaaaaaaccagtgccatgaaatatcttgcgttatttctcatgttcctgcttcagccggtactggcggaagatacagccccatggaaaatagcgatcatcggcgatacgcacgactcccccaagcgtatggaaggaagcgagggagtagcagtcaacttcatcaaaaccctctatggggaaatcctgaaacacaacgtggacatggtcgtccaggtaggggacatggcggatattgaaggaagcgcccccgtcaagggactcgccaaacgcaaggaactcaacaaaattctgagagaaaaaggcatccccttttatgccgtgcgcggcaatcatgaatcccttcctttccgggcggaacaattccgggaactcttcctgcctacgcggaagcagggcaccaaagggctggctaccagaaagttgaactacggcatccgccataaaaacgcttccctgtatttcatggatattgacctcacccccgaccagctcgtggacttcagtgcgtgggtcaaacgcaacagaagcaaggccaacaccgttccgaggcactgcctggtcttcacccaccgcaccctgcagacgcccatgcaattccgggaatgcctgtggggccgttacaacgacagcgcggcggaacagcaaaacatcttttaccgcaacctccgggatgccggagtgcgcttcgtcgtcaccggacacctgcacgcccatgacctgtatatgattacctccccggacggacaaaacacccttacctccctgatctgcgcccctgcggggaacaaggttcttcccatcccttttctgctgcctgcaaaatcccgggtaaaaaccctgcaataccgctccggcattacggcctactatatcctgaccatttacccggattccatgaccctggatacctacgccgcccccaataacggcactactgacgaaggcccccaaagcggagagttcaacaaattgaactcctacgcaattccgatggattagaacatactgcggcccccgtttcttccataacgcagcatcccggaatctgcctgctcccgtccgctatgcacccctggcgtccctggcggaacaatggaaatttccggaaatttcccaatcccccatgttatttcatatgcccggagccacgggactttatctttctatcgtgctggcgcccccggtcgcccttatataaaaactccgttcttccatcgcggcctacagtacggtcaatcaggtctccgatttcctggtcagcgtacccggccttcttaagatacttaaccacttcaccagcctgccccggataaaaacggaccagcatccccacaaacgcaggttccaatctcttttccaaatgatacttacaattgttatttctgtcttcattagacagcagcttattgttgtaataaattgatcggggatcagccccgcgaaataaactcagttttcgttcctgaaccagtctcaaggttctttcggcactcattttatcgtattcctccttcatcctggcctgtttctgctttaattccggatcatactgagtcctgaatgttttcaatacggccgctccatattctgcccagattctgcacagctcctttctctttacgccgcatcgggaaacgattccggatatatcccaggataaactgctcatccacctcacaactccggtcttcaattcataatccatgtttccatagaggccgtctttgggggtattttcatcgtaatcccatgaaaatgcatccgccgaaactacaacataaaaaatctaggacaacaccctgacgtcttctgcgttcacatctccagctcccttggaactaaaggcgccaagtttcttccgcgcttcccggtaacaatccggcagctctttttcatgcaacagggaaagaaactccttcttttcctgaggagacgttttgaatgcggagatgctgtcgggcaacggaagccggagctgggcaggctttccttcagcagtatttcccaaatatatatcagcggaatatgcctctgtttccgtttcaatcctcaacgcgccggaatcctcttcctccacgtccgcaaaggaaaaacctcacagggaaaccgcgcaacctattaaaagaattcttatatttttaacaacaaccgccatcagacgcagatgataccttattgccatttcccattattccatagcaaaaaattctaacattccgcagctttttcctgctaaaagattctgatgctcttcacgccataatacatcgccgcgcctctgttgacgtagtcttccgggttttgcgacaggtctacccagaaaatgaaagaacaccagggggagggaggagagaggggaggaacaacgatttcctgaataccggcctttttctgctccagaaccaggcggacgcgcttttcatgctgccggaacagaagcagatgatcatgaagggttgaaaaaacgcatattccggacaacaccagaaaaacggccacagttatctgcggacggggcacggcactggggatgccgtaccacatacgaagaagaaccagcacgccgacgccgaacagcagggtggcggagaacatggcatggtccgccggaatgacggcggcggcgaaagaaagagccatggcataagacgccagaatatatgccgccgctattccaagggaaattttccatgcccggaaatagttccggtccttgcgaaaacttttccagagaacccaggcagccgccacgcccagcaacaccggaagagccaggtattcatgcatccggaacaggagcgaagggagagcttcccatctgctccaaaaaccggaaaggggttccgcgcagccgggagtggcggaatgcatccgcgcggaaatgccgggcgcaagcagcatgcacagagaacctgccacctggaacacaaggcccgcataaaaccacaggggaagtttttccttccgcaccaggcggacaaaaacaaacaaggctcccagcaaaagccaggttcccggaatattgttttcattggtcatgcctgccggaaatcccagaacagccgcagcggcaaactttccccagccactgtttcttccggaatctccctttctcccggattccgcgtcgtccagcaaaccgcggtacagacacagaaagcccagccagacggaggcgccccaggaatagttggtggcgccggagagccagtaaatcgtgacgccgggcctggccgtgcacgtgaacagcaggagaagccccaatccgaacagacgcacgtccggccaggaacggggatccaccctgcgcccggaagccagataaaacatcatcagcgcaagaccgacctgtacaaaggggttgagcagcatgaagagccattttcccgccgtcgctacggcaaaggccaggtattccccgattctgggattccaggtcatgtaggaggctacgcagcgctcccagaccaggctgaaagagaagcagtgctccatgcccgtcagggcatgatggtacgtgtcggaagtgagaggactccaccagctgagcagcgccgtatacaataaggcggctgcggtcagcgcccaaaaccacaccctggacgtgcggggggacatcatcagctaggatccggtttccttttccgcagtgcgggaggcagatccaggtcttccccatccagaataagggggcgcacacgggcaaaaaggccgtggcccgcacgatcttcctctccttcctccggaggcaagccttcctccagctccttgatgtcaggcatcgggactgactccaattccggctccgcctccgtttcggaaatttgcgcaacagacgcggactcccggagcgtctcctcttcatccggaatcccgggaacgggccttacgggcaccagttcctcttccaattcacgttcatccctcctggggacgggaacaggggcggaaggatccggctccggatgccgttccggttcgtcaaccggggcaggaggtgcaggctgaataatggttttcccctctccgaggaaagatttttcctccggcacaagcactgtctgcgacgccacttcccgctgaagcacaacagacggggaaacagatgtctctaccacaggcacggcgcccagcacggtcagggacaggcggtcttccgtctgctgctccacggaagcgccgatgtgaaggcgcacccccttccccaggatttccgccaccccgtccaccagggcttccaggcgctgcagtgtcagggatgctccgccgcgcaccagaaccaggacatcatccacttcccccaaacgtttttccagaaagagaggggaatgccggacctgatccaatatgtccgccacggaagcatccgcagacgcttcacccacgccaaaggagcaaattccttttcccgttccggctacgctgagcaggtcgtccaatcccacccggagcaggtttccggaagaattcaacagagacggcacaataagcacggcacgggctataagggcgttaactacggaaaaggcttccagcactcccctgtcggggtctatgagaccttccatggcgtcattgtcaaaccgcagcaccatgtcggaatacagggcaaggcgggacagcgcttcatccgcctggacagcgcgccgttccccttcaaacctgaagggacggatgacaacgctgacgacataagccccctgttccttggccagacgggccgcttccggagccacgccggaccctgttcccccgcccagcccggcgacaagaacagccagggcgctgccttccagagcacggagaatggaagactcgctttcacaggccgcctgggctcctacggaggcgtctccgccggagccgagccctctggtaagcctggcgcccagatggatcttgcacggaacggctgaagcgttcaagagccgggcatcaagattcatggcacaaacggaagctggctgaggggacagcaacaacacttcttccattaccttggtgcctgcggcccctatgccgcacaggcagatttttccgggcaggccggacagcccctggggagaaatttccagcatggttgttaatttggataaaggttgatcaggagttcttctttccgaagaaacccagcatccggcccagccagctgcgctgttgcggcagctcggcatccagaatctgggcataccgtatcaggcctatggccgtgcagtagcgcggatcgtccaggtaggaaggcgctccgtttttgaccagcgtaggccggctgatggccacgccgaacacgtgggaggccagttcccccacaccgcgcatcaggctggcgcccccgcacaggtacacgccgtggcagcggttgcccttgaaagtatccttgggcagggaggatttgaccagattgaagatttccaacagacgggaacggatgatttcattcagcacgttgcgttcgatggcggcatccttcatatgcccctctccacgcacgcgcaccatctcgttggttttcccggaaaagctgttggcgtccccttccgttttcttgagcaactccgcctgggccagcggaatgccggtcatcagcgtgatgtcattggaaatgtggtcgccgcccagcggcacgcatccggaggccacaagctggccgtccaggtaaagcacatagtctgtcgtgcccgctcccatgtcaataagcagagcgcccgcctgcttgacctgcctgttgagtacaaactgggccgtggcaatgggggcaaaaaccacatccgcaatatccagcgggacttcccgcacgcaacggaaggagttggtgatgcgggatttgattccgtggatgatatggcagtcgatgtccagggttcttccggtcaatccggcgggattggtcaggttctcctgcccgtccacggaaaagaggccgggcacgcggtgcaggacgaattgttccggccccagggcgacgtcccgggcgatttccgtcacctcgtccatatgctcctgggaaataatgctttcgtccggggggagacggaatgtcccccgattgttctgtcccacaatatgggctcccgtcacggacagatagacggtcatgatatccacgtccgcatggtcctgggccatgttccacgcatcgtaaatgcactggatgaccttggaagtgtcttcaatctctccgcgaaccacgccctcgctaggaacctcacccacgccgatgattgtcacggtcgcatccggcttcacttcgcctacgaccatgcaagtcttgcttgtccctatctcaagccctacgtgaatttttgtcttagccatgaaagtcaaggaactatcaacgtcctcgcaccagatagcacattactttccattattcaagaaagcctgcgcgaacatacgcagaaaacgcggttttcctccgcgcagccccggttcaaaggcctgtaggatggcgcaccaggaagtttctggtattgcggccgtccactctccagcggggaccttcgccgcggcgcccgcttcccgtggtgtcaaaccggaggccgcagatgaccatgaagacgtgtccgtttttggcataaatggaaatccagtccccggcgcctttctgcccgtaattcaggaaaagcctggaatggcgggtggacgtgagcaaaccggcttccttcagcacaaaggaagtgctgccggaacagtcataatgggtatcataatgcctcctgtgccccccgcccagccggtacggcttgttgaccagggaattggctgccgcaatggcgcgcttgacctgcgaaggggcatttctggggggaatggctttcccgttgtgcagcacggccgtcttgccgggcacaaagtggtaggcgggaagacgcgcaggagcttcaacttgttgctgggaggagcaggaagagagaaaaaggccggccaaaagggcaccagccacggagagagttctgtgggccgcaaatgtcataagaattataaactgcggaattcccgcccccttggcaagaaaataaatttcccccgtccacattacatggtagacgggggaaaaaaatcagcaatatttagccctaggaacggctgtgggcatccttttccacagccgcccacagggaatccagggaggcctggacctccgtcaatgcttccttcacaggggcgcccggtttcccgtgcccgaagaggtagtatttaatcttgggttccgttccggaggggcgcaccgcaaaactgcggccgtccgccagatccacaaaaatcattttttccgccggaatgggatcgccttccgcgtccaccaggtcgcctctggaaaaatcccggatgccgctgacggttacgccgtccacttccgtgggaggattggaggaataggaggcggcaagggcggcgattctggccgcgccgtctgcgccttccatcaccagtgatttgcccatttccaaatacacaccgaactgctcaaagagttcatgcagcagttccagaaggctcttgccgatgctttccgcataagcggccaattccgcaaaaatgatggcggcggagttggcgtccttgtcccgcacaaagtcctgggccaggtagccgtagctttcctccccgccgaagacaaagtaacggctgtattccaggcgcagggcacgcgtttgttcctcgctcatcctgcggtagccttcccgtttttccgccggaatggcctgttcatatttaccgagtttctgggcaatatacttgaaccccgtgagcacgttgaccacttcataaccgaagtgatggccgatggcatcctgaagccccgtcgttacaaaggttttcaccatcacggcacgggaacggttggagtcattgatgatgccaagatcggacatgctcatgcagcggtaccacgccagcagggagccgatctggttgccggtcagcaggtgcatcttgccgtcttccccgcgcacagccacccccatgcggtccgcatccgggtccgtggcgatgacgatatccgccccagaagcatccgcctgttcaatggccagggccagagccggcggattttccgggttgggggaagcaaccgtcgggaaacggccgtcctgcacatcctgcgccgccacggtctgcacgttgcagcccagttccttcaacaggggcacgatgatatggccgcccgtcccgtggaggttggaataaacgatcttagcccctcccctgttgaaaagctccggacggagcagcacggttttcaagcggtccatgtaaatacggtcaaaggagggatccagcacatgaagggttccgcgccggtcttccggcaacggttcatattcttcggaagtcagggaattgacctccttgatcacggccttgtcatgcggaggcacaagctgggccccatcattgaagtaagccttgaaaccgttgtcatgggaggggttgtggctggcggtcagcaccacgccggaatccgcatggagttcccggatagcaaaggagatttcaggagtggcgcgaggactgtcgaacaagtaaatgtcacaacccaggtccgtgccgatttttgcgcagaattcggcaaagtcacgggaaaagtggcgcgtgtcgtgtccgatgaccaggcggggcttcctgcccgggtccgtagcctccacatgctttttcacataaataatcaggccccgcattgcccgtcccacattgaagtagttcatgcaggcggttcccacgcagggatattccgggcggccgttcacgccgccgttcccctgctcggcccgggttacgatgctgccgatggtgcgtccccgcagcccccccgttccgaaggccagcgttttgtaaaaacggtcgttcaactcctgccattccccggcggcagccagctcctctacggcctcgcgtgctatgggggatttggttccatccagcagaaggcggatattggtccgggaagactccaaaagcttcccttctttaacggcattcatcagggattcgtccagtgtattcatgctggcggaatagtacatcatgccccttgtttgacaatagctctttccatcatggcctgagaaaaaaacgccatattcatcccggtgcgggcgcggggaacgctttccttcccgtcccctttttatttaaagggactggcggtcatacagctcccggtacaacgggcatgaggcataaagctctgcatgggaaccgtccccgacgatgcgcccgctctcaaacaccagaatacgcgtcgccacgcggatggaactgaaacggtgggccacgataagcgccgtccttccctccaccagccggtccagttcctgctggatcagggcctcgctttccgcatcaagggaagcggtggcttcatccagaatcagaatgggagcatccttcaggaaagcgcgggcaatcgctatacgctgccgctggcctccggacagcccgcttcctccgtcgccaagcatggtctggtagccgtccggcatgcccatgataaagccgtccgcagctgcggcgcgcgccgcagccaccacctcatcatccgcagcgtcctgccgtcccagccggatgttttccataatggtgccgtggaacaggacggggtgctgggaaacgaaggcgatatttttgcgcacatcgtgcagggaagcgtccctcacatccacgccatccacgcgcagggttccggaactaacgtcataaaacctggggagaaggctggcaaatgttgtttttccggctccgctgggccctaccagccccactacttccccggggcggatatgcacgtttatgccgtccagcaccttgcgggcaccgtcataggagaaggaaacgccgtcatagtccagacggccggcggcgcgtcccatagcaacggggtcagcggcctccggcatggtatccggttctttcaggaggtaattgatgcgctccagggaagcgtaagcgctcttcaaattggtaagcgtcacacccagccgtttgagagggtcgtaacacatgaacagggcggcggccaaagcagtaaaatcagccttggtgatgcccatttcatgcccccttaccagcaaaacgcccagccccagcgccgtcaccatttccagcacgggaaccaggaagtgcctgtacttcaccgttctgagattgattttgaaaaaacgctgaatcagccccaggaaaagatttacctgctgttcctgcattccgtaggaacggatttcacgctgggaggctaaattttcctgggctgcggccgtaatattgcccagttcgtcctgagcctgtttggacttcttcatcacgcggcggccgaaaaagcggatgggccatatggccagcgcaatcagccccagattcatcaggaccactgccgtattcggatcaacaaataccttgtacaccaggaaggcaagggcggtcagcagagtcaggggctgcttgatgatgtcattggccgctaccaccagccccccctgcacgttagcggcgtcattgatgaggcggctgatcaggtccccccgtttctggcggtcaatgaaggaaaggggcagcgtctgcaatttggaaaaggcgtccagcctgatcgcctccagcactttcatgctgacgatgctgatccagtacacgttgaagaacgtgcctatgccacggacggcgaaaaccagaggcagcagggaacatacggccagcagcaccgccaggtgcatgtgttccggggccaccagccgggcgatcatgtcctgaagctccgggggaatctgtgtattgtcaaacaccaccggaaatactttggcaatcatcagcggaaagccgaaaccgctggcggcggcagccagagccccggcagccagagcggcgatgaacagcttcatcacgggcttcaaataccgcgcatattcaaaaaactggcttaacatggagcgcctccttcctcctccgcaatcatctgctgcttattgtaaagttcccggtacaggggagaagaagccatcagttcctcatgcgtgccgtccgcaaccacacggcctttctccagcaccaaaatgcggtccgccatccggatggtgctgaaacggtgggcaataatgaacgtcgtgcggccggaagccagtctctcaatctccttctgaatctgctcctcgctcttcatatccagggaagccgtggcctcatccagcaccaggatgggagcgtttttcaaaaaggccctcgccagggaaacgcgctgccgctggccgccggaaaggccctcccccatttccccgatcatgcgggaatacccttcccccgtctcattgataaaactgtccacagcggacatgcggccggcttcctccacctccgcgtcggaagcgtccggacggccgatgcgtatattgtccgccacggagccgcggaacagaacgggatactgggaaaccagcgctatgtgggaaagaagttcctttttactcatctccctcacgtcgatgccgtccaccttcacgctgccggaaaggacatcataaaaacggcacagcaaattaatgaaagtcgtcttccccgctccgctgggaccgaccagggccaccacctgcccggacggaatgcggagatcaatgttcctcatgacaggagagtcctgctggtaaccgaagcaaacgttgcggaactccacttcccccttccatgccgccgggctccttgggttttccggttcgggaacgtcatcaggagcattcagcacgtggttgatgcgttccaggccggcattaagggtttccgccttgttatggacggcccccagcttcttgaccggctcatagcaaagatacatggccgtagccagcgcggcaaaatcccccatgttcataccgttcatgttgccaaccagcagggtggcggccatggctatggcgctgacgaactcaatcaaaggggtcagcaggctctgccacctgaccgcgccgatggatgcctggatgtaacggcggatcctgtccctgaacagccttatctgctgctgttccagttcaaaggcccggatatcccgctgggaagaaaaattctcctggagcgtggaggaaaggtccccctggctggactgcactacccgggcgcgggcaagcattttcctgccgatgtaccggatgggaatcacgcaaacgcctaccaggagcatattcgccagcagaataagaaactgctcgctgacggaggctctgtaaatcagaaaccctaacgcggccaaaagagtcaggggctggataataaggtcattggcaatctgaaccaggccgccctggagaaactgggtatcctgcatcaggcggctcagcaggtcccccttctgctgccggtcgtgaaaagccagggacaaatcctgatactttctgtacaccttgagccgcaatgtctccagaactcccagccctattttggaaagcaaatagacattgacaaaagaagacaggccgcgcaccaccaccaccagcgggagcatggccgccgtggcccacaccgtcaccaggggcaggttttccgggctcacataccacaagagcacccgttccgcccacggaggcagcggtttcccgtcaaaaatcacgggaaacatctcctgtaaaatcaccggaatgccgaaaccgctggaaacagcggccacaatgcctccgaccacagcccacaccagcgtacccttataaggaagaagatactcgcgccacaatgccctggcgcgctgaatggaggattcctgcccctctgttgactgtttcctcataagtattccggatggccgcgcccgggaacggacggcgcgcaatcggcagggatcataccatgaagaccgtgaatgacaagctccttgcgataaaaactgcatgggtaaatgcctggcgggcagacctccgggcatcccggcttgcccgccaccccgtaatggtctacctttccgtcgcatgctgaagacaggattaatccaaccggaaaccattcccggccactttccccgaaatctcagaaccatcgtggaactgtaccgttcctgcctggacgcaggcgcggagctcgtcctctgtccgccgctggccctcagcggcgtgcataccggggaactggctctgcgcagcggcttccggatccagcaccgggcggccctggcctatctggcgcgggaaatagcggatgtccccctgctgctgggagcgacggatgcggaaggcataagattccacctgttgaggaacggcctttcctttccccggcaggccgttatccctccctccccgcatggaaaagaacgcgttcccgtctttggcatccggagaacggaggatgaggcagttttttccatcgccccgtggggagaaattcctccgccgcacgtttccgccacatgcctgctgctccgcacgcctgccaatgcatggcatgagggattgctggaacaggatgaggaagaagcccgcctgacggcgcgggaaacaggcctgcccgtattcacggcccgcctggccgggggagaaggtccgtttctgctgcccggcgcatcttccgtatggtccggcaatgaaaatcttctcaaacggctgcgtctttttgaacgggattccgccgtcatttcaccggaaaaccccacaggaacggactcccctctgccctccccggaacaacagctccggcacgccctccgcaaaggaatggaagacttcattctgaaaagcgggtacggggccgtctgcctgaatttgctggaaaatcccgcatccctcctgttggcggaactattgaaggaaacgtgcccctctctggaagtgacggggttcctcccctccctgcccggcattccggaagagacacgggaaagagtccaagccttcgccggcacggctggcattggcgtacggacggtttctttccctgccaaagccggagggctggacgaaaaagctgcaatcacgtggctcatgcgccaatgggcggaagaagaaggcgccctgctgctctcttctctgacggggacggatatcatgacggcgccccgctttcttccagccgctttagccgcggatttcatgccgctgggggatttatacgaaacggaactggcaaacctgttccccggttttatttctcccgctccggaggccgccaggcgcgacgggtttctcatccgcctgcaccgggaacatgaatccgccacggagctggcgaatcggttcccggaatcggaaagggaaatccgccgtttgcagcggcaggcccgcgcatccgaatggacacgcctgaaactgccgccgcgcctcatgctgcgctccatccccggaacgcaggaaacgccttatatccatcggctggcagactgacgcggaacctcccttttcctcccgtggcatacattgcgcttgctcttgaagaggaagaagtgattagtagaagccatgcaattccatgtagcaaccatgatcggccgcgccgctttaaggctggttgaccggttggggtcaatcggattgctgctttatcaagtggcttcatgtatgtggtcaggccaattccggatgcgcgtgcttgtggagcaaattgcaaaaatcggggtgcaatcccagccggtggttatcatcaccggcgcgttcaccggcgcggtgctggaagcccagacactattccagcttcaaacggtgagaatggaaaccatgggcggggccgtcgtcgccgtgggcatgttccgggagctggggcccgtcatcaccgggctgatgcttgcggggcgcgtcggatccgccatggccgcggaaatcggcaccatgaaagtcacggaacaggtggatgcccttaaatccatgaatgtggatccggtagactacctgatgaagccgcggatacaggccatgcttatttccatgcccatcctgatgatggaagccgttctggtgggcatcgcctccgcgtacatcgtcagcgtcaccgcctttaacgtagaccaggcctactggatgcacttcatgagcaaattcgtcaccatgggggacatcatcgtagccctggtcaaggctcttgctttcggcctcatcatttccaccatctcctgccgggaggggctgaacaccacgaacggcgccgtgggcgtaggcaaatccaccatgcaggccatggtgtacgcttccgtggccctgctcatcgccaactttatcctgaccatgatcctcaactctttcttccccatgggattcatgagatagcctttccccgccgccatgcagccattcatccgcgtccatcagctcagacaaagcttcggcacccaggaagtgctgaaaggcgtaagctttgacgtgggcaagggagaactgatggctttaataggaggttccggagccgggaaaagcgtcattctgaaacatctggacggcctgatggaccccttggacggctatgtggaaatagacggcaggcgcatcagcggcgcgccagaaaaaatcagaaagcaaatccgcagcaacatcggattcatgttccagcagggagccttattcgattccctgagcgtgggagaaaacgtagccttccccctgcgggaggcggggatcagggatgaaaacgaactggacacccgtatctcagccgctttggattccgtaggactgctgggacagcaggaaaaaatgccggccagcctctccggcggcatgatcaagcgcgtcgccgtagccagggcaatcattaccactccggaatgcctgctctatgacgagcccacagcgggcctggaccccattgttacggacagcatcagcttcctcatccggcaaatctgcaaggacaaaggcatcaccaccgtcattgtctcccatgacatgcccagcgtgatccgcatcgcggacaaaatcgtctatctcagaaacggtgaggtttactggacgggaactccggaagaactgttgcactccaaagacgaaatcctgcaaaaattcctgtacggggactccggggaaaactgggcagccctgtccggcaaaaatgaaaacttccaacgggttctgctggaacgggcggaacgggaacgcaaacaataaccatcttgccacagagccatgaaacagaaacttaaaccggaaacctgggtaggcatctttctgatcgccgggatcctgatgattatcggagtcatcctgggattcggcaacatcaaaacatccaaggagcaatcctaccccatcaacatcattttcaaagatgcggcggggctcatcaaggattcccagatacgcctgggcggcgtcacggtggggaaagtcaccaaagcccctgagctcctgccttccggcaatgaagtcatgctggaagccaacatcctgagcgatgtgaaaatccagcaagggtccgtcttccgggtggacatgcagaacatactgggcgacaaatacatcgatatcgttcctccggcccagcccacgcatgaatacatccttccccatgccaccatcatcggtcagccggaaagcgatttcagcaaaatcaaaaacaatgccgtgggcgccacagaggaaatcctgaaaatcctcaagcaaatcgagaaaaattcggacaacattgacgacgccatcctcaatatcggagaggcggccaaaggtctggcccagacgaccaggctgatcaacgagggcatcctgaaccgggagaacctccagaacctcggcagcgtactgtctcaaataaaccgggcgggagaacagctccccggcctcatggaagaaacgcgctcctcggtcgcggccatgaaagacaccgtccgggatgcccgcaaactcattgccggagctgaagaaaagctcaacactctggaccccgccgtcaaggcaatcccccctacgctggccgctctgaggaaagcatctgaacaaatctcctccttcacggctgatgcacgtaaaaaccagggctttcttgggctgcttatgtacgatgctcgcttccgggccaacgctcaggaattcatccgcaatctgagggattacggcattctgaggtaccggaatcctaacgaaccccaagtcaaaccggacccccgcggcggtttttcaggaagccgccgctgagagaccgcacaattccgggtgaagccgctttacacacttgccaatagtgggaagcgtgctaaataatttccaatgtgagaggcgaaaacatgtaagtcgacatgtttttcaacaggaaccaacccttaatactctaatcaaccatgcaagacaaccaaaccgaacttgaaacgaccgcagcagcaaacgacacttcctgctcctgcccttccgcccgcgagcttgccgtcaccagatttcaacaggccagggccttcgccgcagctaaagtaaaccaaatccgcaaggcggctacggaacaggccagcaccatctgcgactacgcccaggaaaagggagaagtcatccgtgacaaggccaagaagttccacgaagcaggcgaagaatacgtgaaggaaaaacccacccagtccgtgctgattgccatgggcgtgggccttctcatcggtctgcttatccgccgtcgttaatcctctcccttcatcccgcgccatgcgtgccatgcgcatggcgtcctccctcccctttcaaaccgaaccatgggactgatcgacaaactcaagcgaaccttcgtcaccccccttgtggaggaaaaggaagaagggatggccatggtccggtccctccgggaaaccgggacggcagccctggcccatgcggaagccctggccgcactgctcaaactggaactgaaggaagcgtccagcaggctgggcaaaaaaacggcctttctcctgatgggcgccttcatggccttcttcggctatctatttctgtggtgccttctgactgtggtcatggcgtatttctggggaatcatcgccgggcttgccgtaaccacgggctttcatctcctggccgccgcagccgggttcatccttttcagccgaacccatgtaacgcctatcgctccggcgacggcggaagaacttaaaacggatttatcatgtctgcaaatggctctcaagaaaagctcgcactcctgatgcgggtagcttcctcccggctggacatcgtcaatgaggcggacagcctggtgcaaaagacgcagcagcaggccgaccacttccgtaaattgaaaaaaaaggccatgtccctgcctgtaatcggctctattgtcggaacggtgggaggcattcttctcatccgcatgtttgcggggaaaaaaagcaatccggcccctcccccgcagccgcgcacttccggaagctgggttaattcctccatcttccgtttcatcgttgaaattctgattaccctggctttcccttccctgaaaaaaatggggatcggcctggccggcaaaaaattcctcaacctgttcaaataacaggattttcagaccaatacagcggttttctgccgcttcttgaaaaaggttcgggaactccgctgccgtaaaaaatggggatgttcccgcgccgttaaatgagaacctccccatatccttcccgtcttccagggaacaataaatcatgcctggcgtaaaaagccggcctgccgcgccagcccccccgttccatcatcctccccttccccgaaaacaaacgcccgcagctcttccgcaaaacttcccctctcgaaattcctcacccgtcgcggaacagggcaaagccgctttcacggaaatcggttcccagacattttttgctggtcaaaaaagctctgttttcgttaatatgcagctttatcagtttgctgcattcacaacatgagcgaatacattttgccccacgtcgacggatatctcaaacttggacaggattatgactgttccgatatccaccttgccgtcaacagccgtcccacctggcgccggttcggccagcttctccccatctgggaggaagcgcccaatctcacgccccaggacacggaagtgctggcgaggggctttctggaagacccggaatggaaccgccttcagcaacggggggacgtggacttcgcctacgccaatgactttggccgctaccgcgcatccgtggttaaacagcgcctgggctatgacatctgcttccgcatcatcaacacgcgggtgcggaccatggaggaaataggcctgccgacggaatacgtggtgcccctcacccgctacaccaacggtctcattttagtcacgggctccgtaggttccggtaaatccaccacgctggcctctatcgtggatttcatcaaccaggaccgccacgaccacatcatcacgcttgaagaccccatcgaatacctgattccctccaaaaactgccacgtcaaccagcgcgaagtgcataaacacacggaatccttcgcgcgggccctccgcggagccctccgtgaagaccctgacgtcatcatggtgggcgaaatgcgcgacctggaaaccatctccctggcgctcacggcggcagaaaccggccacctggtgctcggcaccctgcatacgggctccgcagcccgtacggtggaccgcgtgctggacgtcttcccggtggaacaacgcgaccagatccgcatcatggtcagcgaatccctgcgcggcatcatctctcagcagctggttcccagagcagacggcaacggccgcgctctggccattgaaatgctggttaatacgccggctatcgccaactgcatccgcgaaggcaagacattcatgattcccggctgcatccagacagggaaagcccagggcatgatcctgatggacgactcgctccgggccctgcaccaggcgggcctcatcaccacggaagactgcatcttccgcgcggaagacaaaaccatcatgaaatccttcctgggaatcaagtaacctttaattttgaaacactcctgttatggctgtcatcgaccaatacttcaaatacctcgtagaagcgggcggttccgaccttcacctcagcgaaggccagcctcctaaagtccgcgttaacgggaccatctccgccatctccgacgaaaacctggaaggccaggcgttcaaaaaccttctcgcggaaatatgcgatccccaggccttccagaaatatctggaagaaggggatctggactttgcctatgaaatggatgaaacatcccgtttccgctgcaactacttcaagcagcaacacggcctgggggctgtcttccgcctcattcccaccaaaatagccacgctggaagaactgggcgtgcctacggtcgtcaaggaattcgcccatatgagatccggccttgtactggtcacagggcccaccggctccggtaaatccaccacgctggccgctatcatcgactacatcaacagcaaccaggcgcggcacatcatcaccgtggaggaacctatcgaattcgtccatcccaataaaaaatccatcgtcacccagagggaagtgcctctccagacgccttccttcgcagacggcctccgggcttcccttcgtgaagactccgacatcgtgctggtgggtgaaatgcgcgacctggaaaccatctccctggcgctcacggcggcagaaaccggccttctggtattcggcaccctgcacacgaacaacgccagcaaaaccattgaccgtatcattgacgtattcccgtccgaccagcaatcccaggtgcgcaccatgcttgcgggttccctccgcggcgtcgtggcgcagctcctgatgaagcgcagcgacaaaccgggacgcgtagccgtcaatgaaattctctttgccacgccggccgtggcggccatcatccgtgaaggcgccacgcagaaaatccctgacgtcatcgtcggcggcaaggccatgggcatgcaattcatggatgacgccatctggcaaaaactccaacagggcatcgtctccccggaagaagcctacatgaagtgcattgaaaagaagagattccgcaacttccttcctccggaatccgcccgcctggcagactccggcggcggaaactaagctctttgccctccttctcctgccatgtctcccactggaaaattcacgctcaggcttgtgatttatggagccttcctgctctatctggtgggagacttgtttatctggcacggctttctggccggcaggatggacgcgtacctgaaaccgttgccggggccgccaggagacaactccgcccggatagcggaagtgtacggggaacccgtcaccgccaaccagctttcccgaagaattacggaactgaaaatgctgcgccagcctcccgtgctggatatggaaggcgggatcaaacttactcatgaaccggacatccccggcgacctggctccgcgggccaggtatgacctgatcggttcctcccttctgcgcctgaaaaccagcgtcaatgacctccagctccccaaccgcaacgcggaagcggcacgcgccgtggaacaaatccggtcccgttttgacggagacacggaacaatacctgaaaaccctgcatggccagaaattgacgcaggaacaatttcaaaaaaaaatagcggccaggctcaaacaaacggaacagctctaccgggcaaccgcccaggcggctgaagcgtccgacgaagacctgaaaacctactacaacctgatccgggaccagctcacccctcctgatctgcggaaaaccaggcacatcttcctggctaccctgaacagggaagaagcccaggtccggcaaaccgcggaaacgctgctggagcggctgaaggcaggggaatccttctcccggctcgccagggaattcagtgaagacgaacgttccgctcccgccggcggggaactcggctggataagccccgcccgcgccaaggaaaccctgggtctggcgttggcagacgtcccggacaacaggccggtacttctcaaaagccggtgggggtggcaccttgtggaagcatcccctgttaaaaaaggaaaaatgccatcctatgaagaagcgcttccggccctgagggatgcagcccggagtctcagaaaagctcaagccgtgggattatacatggacggcctttttgaagaagcccatctcagaaaccgcattaaaaacaagcagggccgctgacgctccaattccggcaaacgggccttcgcaaaaatcggaaacatcaggtccgcctgcctttacacctgaacattcccgcaggccctccggcttccagaccggggcgttcctcctttcccgtaaaagccgggcgttcccggaaatagccatcttccctgcggacggcctccggcagtcatgaaacacccgcacgagatgaggaaaggcggcatcttccttcttatttgcctttcctgacgaattccgcttgctttcaaacgcgggatgaactaaattcttttcggtatttcccacggggtattagctcagttggtagagcgtctcgttcgcaatgagaaggtcaggggttcgaatcccctatactccaccatccatctctctttcccgctactgttttttattcgggaataacgggtagccctatgaatggtaacttatttaaaattgtactggtttcagtcgttgccattcttttagccatcataggcggcatcatgtcggcggacggcgatcccctttctatagttctggctgtttccccctttatcctggccgccttattcctgatgaagggaaaagtgtggtatctgtggatactgatacccattcttttcctccccatcccctccttaagggattacgctcccctccttgcttacggaataacccttccttgttacttgtggaacgccatgctcaggcgttcaagcttgacgtggaattccgccccccttctggacgctgtcgtcctcgtgctgttcatgcatgtgggctacatcttcctgagccaccctttcgctctggggctggatgtgctggaagactactacggaggcaagggatacatccttttcctccaggccctcctggcctatctctgcctgtcctcgttaaaaacgaccagccatgaactgggcaaggtgcttcaatgggctgttttcctgaccatcgtttttacccttatcctaaccgcccggagcctcctttctccggatagcgccggggcggatctcgccgcgagcgcgggctccgcaggcacactctccgaaaactcccggaactcttccttcctcagaatttctatcttggtgatgcagctgctcatcatcaactactccgtgtggcagatgatcaaacgtccctggtggggggcgttgcttcttcttggaaccgttggcatcctgttaagcggatttcgctccgccatggcccaggttctgttcctgttcttcaccatatccctaatttacagaagatggttcttctgccttctggctcccgtcctcggagtgctattgctcttgctgctctcctctgcgggcatgctccattctctgcctttcggcatccagcgcaccctctcagccgttcctttcctggacgtcagcgcgcaagccaaggcaaacgccgaagactccatcaactggcgctttgaaatgtggagctgggctctggatgaccgtgaacactttattcaggacaaaatattcggagacggcttttcacgggacatcagcatcgtgaaagccaatgtatatgaagaagcctacaacctgagcaaagaccaaagcgcctttgcgtggaacggccaatggcacagcggccccatttccacgattcaaacgctcggctacatagggatttccctgtaccttatcctgtccgtcgttggcatgacctacgcatggatcgtcagtagaatttaccgcaaccatcaatacaagctcggcatcctgtatgtttccgccgtctatttcaccaaaccaatcttctttttcctgatctttggggaaagcatcactattgcgatggacatcatatccctggccatcatcaaagtactctactcctgcgccaagagggagggcctctatgtatctctccatgtccgcaaggaatacatgccgctcatgatccggaaaacgcaggaaaaacggcaagccgccgcaacggcatccatttccggctgactgttccttcccgggaaaaacaggcgtcccctatgcttgaggctggactaattcaaagggagttgctacctttcggggcggttccttttcccatggcagcagatacttcccatcatatcatcggcctcattccgtcacgctggggttcctccagatttccgggcaagccccttcatcccattgcaggaaaacctcttgtccagcacgtatgggaacgcgtctgccgctgttcccgcctggacgccatcgccatcgccacggacgaccagcgcatttttgacgccgccgtatcctttggagccagggccatcatgacctctccggaccatcccagcggcagtgaccgcctggcggaagcggtacgttccttccctgccgccacccatgtcgtcaatattcagggggacgaacctctcattgacccggccctgattgacaggctggcggaagccctggtctcggacgaagccctctccatggccaccgtcgcctgccccatcagcacccgggaggatctggacaacccgaacattgtcaaagtggcccttgcccgtaacggagacgccctgtacttctcccgttccgtcattccctatgcccgccacccccgcgtagcaccgcctttgcgccatctgggtatttacgcctaccgccgcgacttccttgaaaactatgtgcgctgggccccgacccccctggaacagacggaatccctggaacaactgcgcgcactggaaaacggggccagaatccgggtcatcctgacggaccacgtcagtgtgggcgtggatacgccggaacaggcggaacaggtggaacaaatcttattaaacatacactaggaagcaaatcatgaaatatatcttcgtcacaggcggtgttgtctcctctctcggcaaaggactggcggcggcatccatcggcacgctgctggaacgctgcggactcaaggtaacccttcaaaaattcgacccctacctgaatgtggaccccggaacgatgagcccgttccagcacggggaagtgtacgtcttgaacgacggagcggaaacggacctggacctgggccattacgaacgcttcgtccattgcagcctctcccggctcaacaacctcacttccggacaggtctttgaaagcgtgctgcggaaggaacgccggggagactatctgggaaaaacggttcaatacattccgcatgtcacggatgaaatcaaaaaccgcctctatgaagtcacggaaaaatcagacgtggacatcatcatcacggaaatcggcggcacggtcggggacatggaaggccacattttcctggaagccctgcgccaattcgccctggaagtgggccgtgacaacgtctgcttcattcacgtcaccctgctcccctatatcaaggccgccggggaaatgaaaacgaagcccacccagcaatccgtcgccaagctccgggaaatcggcatccagccggacgtgatcatctgccggacggaatacgacatgagtgaagacgaacgccgcaaaatcgccatgttctgcaacgtggaagccaaaaacgtcattgccttccgcgacgtcaaaaacaccatctacgaatgccccctggatctcagccaggataaaatagaccgcattgtcaccaggcggctgggactggacgttccggcgcccaatctggcggactggcagcgttacgtcggcagggtcatcagccccagccactccatcaggattgccgtagtaggtaaatacatcgctctccaggacgcctacaaatccatctatgaatccttcactcacgccggtgcggaaaatgacgcccgcgtggaaattctccggatagacgcggaagaaattgaggaaaagggcgcggaggccatgattggctccgtggacggcattctggtgccgggcggctttggagaccgcggcattgaaggaaaaatccagacggtggaatacgcgcgcaccaaaggaatcccgttcctgggcatttgcctgggcatgcaggtggccgtcattgagtacgcacgccacatctgcggcatggatgacgccaactccacggaattcgaccagaaaaccacccacccagtcatcagcctccaggaagagcaaaaaggcatcaaggccatgggagccaccatgcgcctgggcgcctacaaggccctgatccagcccggaacgctggcgcacaagctttacggcaaggacagcgttacggaacgccaccgccaccggtacgaattcaacccggcctaccgcgacgaactggaaaacgcggggctggtcatcagcgccgtcaatgacgaacacggactggtggaagtcgtggaacttcccgatcatcccttcttcatcgcctgccagtaccatccggaattccagtccgctcccaaccgggcccacccgctcttttccggcctggtttcagccgcgctggagcacaagagccactcctgaccctttcattaagcccggggccttttccggaatttccattccggaaaaggccttctctttccaggcatgctcacggaccttttcgtcatcgtcatttactttcttgctatcttctgcattggcatttatgcgggacgaaagcaaaactccctgacagactatgccctgggcaaccgctccctgccctggtgggctattctggcctctatcctggcggcggaaatcagcgcggccaccttcctgggggctcccggagaagggtaccatacccgcaacttcacatacgcccagctctgcatcggcaccatcctgggccgcatcatcgtcggcaggctctttctcaagccctattatgactacaaggttgtttccatctatgaatacctggaaaaaagattcgggctcctgacgcggcggacagcctccatggtcttcctgatcagccgggtgctcgccagcggaaccaggctctatttcgcgggcattctgctggtcattgcctaccagttcctgacaggcgtcacggcagacgccgaccagattgtcctgctctacattgccgccctggttgccatctccgtcgccacgacaatttataccgcgatcggaggattgaaagccgtcgtctggacggacgtcctccaggccgtcgttctgggagtctccatgctttccgccctgtgggtactgttctcccatatccccggagggtggagctccatctccgccgccatgaatggcggagacgattggaaattcttctcctggggaaccggagaaggcctggacttcctccaacaaggcgcccgcgtgctgggccaggaatacacggtgtgggcagccttcctgggagcaaccttcatcaccatggctacgcatggcacggaccaggacatggtgcagcgcatgctggcggcaaaaaacagaaaggcgggaacgcgtgcagtcatcgtatccggcttgctggacttccccatcgtcatcattttcctcttcacgggcattcttctctatgtcttctaccaatacaacccggcaaacctccctgcagacacgccgcagctgcatgtgtttccctacttcatcatccatgaacttcccaacggcatccgcgggctgctgatcgccggacttctggcgacggccatgggctccctctccacggctctaaactccctggcgactaccgccaccaaggactggtaccaggggatattcaaaccggaagccacggaacggcagctgctccggtgcgtgcgctggggaacggccgttttctccctgctgctcatcctcgtgggttccatcacagcgtggtatgtggtgcatcacccggaagtccgcatcatccaaatagccctgggcattttcggctatacctatggctccctgcttggcattttcctgttgggaatgctgacccgcaccagaggcagcgactcaggaaacatcattgccatggcggcaggattctttgtcatcgctttactgacggaactcatccctctgccctccggctggcaacaatatgttccggaaatagcatttccgtggcgcgttaccatcggaactctggttacttttaccgtcggcttctgtttcagaaaacgccgccttcccatgcgctgaacggtgaacgccgttacttggccacgttcatgttccgcattccccttcaaaccgccccgtcaatgggagtaaaggtgcaagcgaaaaataggggattaagggataaaaatccctgagggagggcgctccctgtccaacgggtgcgccggaactccttctcccggacacaaaagcgccgctttcccggaaagggaaagcggcgtgaaacggaatggaaacacgctccctccgctacacttcttcgggggacagccagcggaaggaaacgatgttgaactttcttccaaacgccttgttcacggcgctcagctccgtatcctccagcgcgccgctcttcatgttgacctgccgggccggagtttccgggctgttcaccggatccacgtagttgatccccctctgcaccaccgcttcgcaccacgcgcgcgacagcaccactccttcgcggttggccagctctccgtaggcgcgcaccgtaaacgtatcgtccctcgtcgtcaggatgttgcccagcaccgccagcacgtcagactggatcaggtagccgggggcggccgtatacaccgatcccctggccgcgtcctggttcgggtagcctcccttgggcgcgatcaccatgtcggaaagttcgtcaaacgtgctgttgatggagctctcgtcaatagccgcctgaagcgctcccttcacccccatttccccgctctgcagacggcggttgacaaagtcggacatgttcaggaaggggcctctctttttgacctccttgaccatgttccgggccagggacctgatttgcgtgtcgctcagggttctcaggtccgaccacgccatagcctccccgtccgggatgccctgggtcacccctatcgaaccatagtcgtccacgtgggacttgtcgctgctggccactccgaaacgggaaaaggacgtctgggagttgttgagcacggagggcctgccgctcctggaatagagaatcttgcgcttcttgagccccaggagggtggcttcccaggcgcgctgggaggtggagttgacattgaatcctccggcgacggtgaggtacttggaggcatgcttgtagccttcgtccgttctggcgagttcttcgacgacagcttccgagggtttgccctgaaggtcgggcaggaagcggcggttggcgatacctgaagccctgttggatgaagcgtccgtagagaaagcctgctgaagcacggttttaagttcttccctgcccgtgcccccaaggctggaaggacgggcggccagggaggaggcgaaccaggagtcccagagggcgtcgttgatcatcaggccgtggtcccagaagtcccccagggcggcgtcccccatgatttcgttgtgggagaaaaccttgtcggcaggaagcatgggatcggcaaaagcattgccgatgcctacgcccggcacgccggactggtaggcgaagcgtttggcgatagccgccctggagtcgctcctgtaccatcccggggtgaggcggcatccggcaaagccggccaggctggagggctgctggaagggaagctccgcggcgacaatcttgttgacctgctcggctcccggtcctccgaagggggagagcctggtgccgtcattggagaggatgttggagatggtaatcgggaagaaatcgctgttggcgttcttgacttcaaactggtacgggctgtagaggcgccccagttcggaggcggtgggcatctggcctccccagaaaagggggctggagtgctgccatgtcttggcccggtagtccttgccctccggataggctcctatcacggggggcttgccccattttaccgatactccatagtaggcgatgaaataggggaatggaccgttcggctcaggttctgcgtatttgccgcgtttcgtgccatcttcatcgtcatctcttttgaagttaatccatccatctactggtatttttgtcgcctgcatgatttgttcctcaaatccccagttcagattgagcatcgttggggacatcttagaaaaaacgacagggtccggtgtggaagccccgcttaaacgtgtatcttttccaatttggctggcgtccataatgccagcacccatcatgaaagttcccaattttttggaattggagttgtattcgtccgtatacttatggcacagaacatgattgggaggagttcccaaggaggtatttcctccattccctatcaggtcattatccgtttccgcaaagcgggcccaaaacgtgtacttattctctgttggatagccagatctttcaaagtattgatattgaagacctgtgtatatattaacgccataagaaaccatctcactcatgtcttgcggccacccttctctaaaagcaaaattatccgttcgaatatcatatcccccacttttagatttatatacagcaccattttgaattttgttggtacgagttgtagatggttgggaaaaaacaacgatttctcctgctttaagaacagatacctctcctttcactacttctcctgtaccgtcgttcagccgggaagttttcctgtaagaggcaccgaaatcggctacctgccgatcatgtatagctccgaaagccccttgcgtatatggcgtcaaaggatgctccgtatacatttttaagctggaaagaggtccagaggaagcgatgttatccgcaaaaagcatgggtttaaaacgatgttcgccaaagtaagagccccatggatttcctccggctccctgaaatttcatgtccacattatacggattccaccagacataaacaggaacgactgatacagctgtgttaatccagcctccgttttgagattgccgatcattctttgttaaataagaaccgataaaattgtaataacgcagcaggatgggatggcgcatgtacgtgtagcggttgtccatcatctccaggttcgccgcggcatccgccgcaatcagcgtgctgggagcgcttccgttccattgaagggtggcggaggcatcctggccttccctcttcgtggaggagtcccacacgttcgcccacaggtaaagctggttccaggagccgatcggccggttctggtccgacgggttgccgtcctcggacgtgtacggacgcaaccctatgtccgccgtatcgccacgaaattccgcaggcagtttttcttgagaaaatatgatattcaagtctttttttaatccaccgaatttagaatccgatttttctataaaaatcataatataaacctttaagaacggaattggataaaaatgcgatttttcttgccttatttttctttccaattgtcccggagcctgtttgctctgctcaacgtgtgccctgttgaaccaactttgagcttgcatgaactgcctcttttttgtattggctagagttaagaattggctcttcgcacctttgtgacagcagaggtttttcctcctcacactcgaacggaaaggggcctgccgaaacccatcattttcatgaagatcaaacttttcactaaacgtcctgtcaggcatgtcagcaaggggtttgccctgattgccaccattaccctgatgatgcttttagccctcctcagcgtcggccttttaaccattgcatcttcacaggtccgtatttccgagaaacagctttttgcggcggaggccaaatccctcgccagattttccctggaagtagctttgggccagcttcagtgtgaattgggccctgaccagcgtgtttccgccaattccggcattctttcttccggaaccagcgaaggaaacgccccttatattctgggtgtctggaacagctgggattcctggctcaatacgaataactccgagggtatgaacatctcggccacctatgatacaggaagaaaatccatgttccgccgctggctcatttccgaccctgatttgcgcaggctcagttctctggaagcgggtaaaaacctgttgggcaaacgttctctctctaaccagaacttccgcagcgtcgccctggtgggaccaggcacgatagggacacccgttggagccaggaatcaggataaaaaggaaatctacgcccgcatggtgcgcgtagatgattcctccaagaccacaggactgaaaaagaatgctaactcccgtaaatatatagcctggtgggtcacgggggaaaaccagaaagcgcgtatcaatttgatgccgcatgcttctgaagaaagtacggatgccctgacggtgctgcgttccacctgggatacgcccggccccgatctggagtctctcaatctttcttccgtaatgacggcgggatccgggaacgacatgtccgcagtcagaaagcttatctctcttgattctctgctggccaacaataaaaacggacgtttgaaggatttgggtgacgtttaccacgacatctctctggtttcttccagtttgctgacggattctaaattcggcggtcttaagaaagacctcaacattatgttttcccaggaaaaacttcctgaagaatttcgcggcgatacggcggacatagggttgcgtccgtacacgtccgaggacggcaacccgtcggaccagaaccggccgatcggctcctggaaccagctttacctgtgggcgaacgtgtgggactcctccacgaagagggaaggccaggatgcctccgccacccttcaatggaatggaagcgctcccagcacgctgattgcggcggactccgcagccagcatggaaatgatggacaaccgctacacgtacatgcgccatcccatcctgctgcgcttttattcctttgtaggacttaactacgtcaaacacggcaacaagcatcccaaccgtggaggatggatcgacttccgtattgccgtcattcccgtgtacgtctggtggaatccttataatgtggatatgaagctgaccggggccaacggaggtgtctggggcgcctacttcggcgagcaccgcttcatgcccctgctgctttcccataatgttaaattcgcatggaaccaactggatgagaatgcactctccaattatggagaatcctgcctgatcccctatttgaacgcttcttataacaaccgccaggtggcggatttcggcgcctctttccgaactacggccaaacttaacagtgacggttccaccgtcaagggagagccttccaccttgaaagcaggcgagatcgtcgtctttgcccagccggtcgtttccaatatcgccaacggtaacgaagtttacaaaacaaagcccaacagcggtgatttcaaaccggacagattcccgctcaaagagggatggtcccaggaaccgggacaagtcagctcttatgccgtcaacctgacggacggcgtccgttatgaacttctggacggcagcggatataaccaggtaggtattgccaaggcttccgttatcttcgcggaagataccagccggctcaacggaacgccggacaatcatgttctcgccgtcaaatacggagacaagggtgcctccaaagccctgggaaccttcgtgatgggggccggcctgatggatcccaacaaaatgaacagttcctcttccctgaatgggaaaagcacggcggaaatagaaattttctccaagaccatgccggccatcctcaacctgaactggggtgcctgggaaaaacctcttgttgaccaaattaaacttcccgcagaaatgtgggaacgcaacgaagggaccaatgaagaagctaaaaaagcgggcgaatacggcacgccctctttggactccacgtttgtcgcctactatggagtatcggtaaaatggggcaagccccccgtgataggagcctatccggagggcaaggactaccgggccaagacatggcagcactccagcccccttttctggggaggccagatgcccaccgcctccgaactggggcgcctctacagcccgtaccagtttgaagtcaagaacgccaacagcgatttcttcccgattaccatctccaacatcctctccaatgacggcaccaggctctcccccttcggaggaccgggagccgagcaggtcaacaagattgtcgccgcggagcttcccttccagcagccctccagcctggccggctttgccggatgccgcctcaccccgggatggtacaggagcgactccagggcggctatcgccaaacgcttcgcctaccagtccggcgtgccgggcgtaggcatcggcaatgcttttgccgatcccatgcttcctgccgacaaggttttctcccacaacgaaatcatgggggacgccgccctgggggacttctgggaccacggcctgatgatcaacgacgccctctgggactcctggttcgcctcctccctggccgcccgtccttccagccttgggggcacgggcagggaagaacttaaaaccgtgcttcagcaggctttctctacggacgcttcatccaacagggcttcaggtatcgccaaccgccgcttcctgcccgaccttcagggcaaaccctcggaagctgtcgtcgaagaactcgccagaacggacgaaggctacaagcatgcctccaagtacctcaccgtcgccggaggattcaatgtcaactccacctcccagcgcgcctgggaagccaccctcctggggctcaagaagcgcaagattctctattccaggagcggcaggccctccgtgctcaacaactcccagacgtccttttcccgtttcggagtggccagcagcgacaagtcccacgtggacgactatggttcgataggggtgacccagggcatcccggacggggaggctatggcgtggtcggacctgagaaccctgagcgacacgcaaatcaggtccctggcccggaacatggtcaaggaggtcaaaaagagaggccccttcctgaacatgtccgactttgtcaaccgccgtctgcagagcggggaaatgggggtgaagggagcgcttcaggcggctattgacgagagctccatcaacagcacgtttgacgaactttccgacatggtgatcgcgcccaagggaggctacccgaaccaggacgcggccaggggatcggtgtatacggccgcccccggctacctgatccagtctgacgtgctggcggtgctgggcaacatcctgacgacgagggacgatacgtttacggtgcgcgcctacggagagctggccaaccgcgaaggagtggtgctgtcgcgcgcgtggtgcgaagcggtggtgcagagggggatcaactacgtggatccggtgaacagcccggaaactccggcccggcaggtcaacatgaagagcggcgcgctggaggatacggagctgagcgccgtgaacaaggcgtttggaagaaagttcaacatcgtttccttccgctggctgtcccccgaagaagtgtagcggagggagcgtgtttccattccgtttcacgccgctttccctttccgggaaagcggcgcttttgtgtccgggagaaggagttccggcgcacccgttggacagggagcgccctccctcagggatttttatcccttaatcccctatttttcgcttgcacctttactcccattcatgtacttcacaagggataaaagcccgtcaggggcctgccatcgcgctccgctgcgcgggccgatacccatgcccttccgcatttcctccgtgcggttatccgccaaagggttatgcaatgtatcaaaactttttccattccccagaacccagaatatatgcgtattttacccatcctggcctttacctgccttttcggaagcatttccttcgcccaaggacagagccgcaccccctccaggccggaaccggcccaaccggcagcaaatgctccggcggccgataccgtggacaagtccctgccgccagccgccgtcaacggcatccggttcgttctgaaggagcccatgtctcttccttctcccatttacatgcctattgattccaaaaggctggaaaaagtggaaatccgcgccgcccttccggggcgccgcagcgtttaccccaagagcaagatcattaccctgttcgggggcctggaccagaaaggcatgccgaccaataaactcgtcagcaagcccctgccgcccgatcttggctccaaaaccctggctctggtcggcaaaaacagcaaaggggaattgacgctggattttattaatgagtcggaactgccgctgaactgcgtttacatccagaacctgaccggacgcacgttcactttggaacttcccaaacctccctcgggagaaaagagcgctatcgaactgcccagcaaatccacttacattttcggcaagaactctacagacagcaacatttcccgcaccacccccgccaatttgacgtacatgacccgtttaaagaacggcaaagtcgtcaaggtgaaggacagaggcatgatgctgacgacctacccgggacgaaaagtggttatgattatttccccggattccaccggccgcaccgtcgttttgacggaactgatgattttcaaggaaaggccgggagcggcttcctctgacaagtaaattttcttccgatatccgggaagccggaagctgctctggagtatatccggattattcagaaaaacgggcattgctgcccgtttttttatttttcttctcctgacgccatggattgagggaataaaccactccggacatttttccggcacgggaacaatgtccaccctgtttcccgcggctccaatgcggcaggcggagaaagaggtctcgaagccatgcggtttgccgaaaaagttcacctgccgccttccggcatccgggcaggcttaataaactttgggcaccagtccctgacggctcatcttatcctccacctttcgccggttttcctccagacgccgggcgtcataggaatcatccacaggctgggcctccggaatgttttccccgcgtcccgcccggtattgctgaacctgcgggagcactccttccaccagttccctgcatatccaggaaggcaggatataggtctccgtgcgtccggcccggctcagagccagcccaacaaattttccgttgacgtcaatgaccgggcatccagcccgttccgggaacaaggtcatgtccgactggataaccaaagggaattcatcccttttcaagctcatccggttgcccatggagttcatcatgtcgagacgcttttgcgggaatttcatcaccctgggcctgggccccgtgaggagttttccttctatcacctggttccgccgccttacttccacgggaaccgtctcaccgggacgcaccccgaccatggcggcacggatggagtacattccatccaccggctttccattcagcttcatcagcacatcgccggccgtcaatccgctgcggtgcgcgccgcttccggcttccacgccgcctatcatgaccccctccccgtcccagcggggatcggaaacaatgccgagataaggctggtcatccgcccgcaggctgcgctgagccacggaaacgactccgaagtcgctcacatgccccgtgggcgacacggctgcaatcacgtccccttccttcgcctgcacataggaatccaggtcaatgggaggagcgggaagccccggcacatccatcatcagcagatcatgctccggaagggcaaagagcaccttggcgtcataaacccgcccggaagaatccaccagcatgaccggacgccgttccttctggagatcgctcagcttggtgaggacttttcccttccccaccactgttcccaaagccacctgggtattgccggcaaccagagccactacggactgccccaccggaacagccaccttgtcccattcccggaaaatctccttggcctggctgtccagcacacttttgtcctccggggcaatcatctgctccggaggcagcggggaagctatttcctgggcatacgcggaagccgccgcaaatgccgcccataaatatttcatcatcatccttgagtttgttcctggtatttcaggccggacatcaggtcgccgcgcctgccgaatgtaagatccgccttgtaagccgtacctttcctcaccaccaccaatggaacggtttcccccggacggtgcctgcccagttcacggagcatatcccgcacggaacgcaggctccggctgtccatgtgggtaatgacgtcccccggctggatgccggcggtatccgccggagaattcaccacaacgtcttccaccaccacgccgtccacgcccagcacatccatcatggcaaacccgagcacaggagattcgggatccgccatgggatgaaggcccagctgaccccaatgcctgccggagagcagtttgtcccagtctctcctgaaaacggaaacagggacatggttgttgattttcaacatagggccaatggaggaatggatgccaaccaacttgccggacaggtcaaagaggggaccgccggaatctccgccaatcagcgtacattccgaaataaggaagcgctgctttccgtccgtgcacaatcttcccatgcggatgggcgcgcggcgttccgggtcaaatcccttggaatggcccagagccaccacaaaatcccccacatgaagaccgtcggattcccccagttccacatgaggatagtttcctccgtccataatttgcaccatggcggcatcccgcgtgaagttggcgcccagcacccgtccctttaccacgcgcccgtcggcaaagaccacacgcatgatttcatcgccgcccacgacgtgggccgccgtcaaaatcaggccccgcggagagacaatgacgccgctgcccgtctctcccccgtcggaaaccagagccaccgtagcagccgtaaccctggaggccacctcatgcacatgtttctgcaaatccgccatggaagaaacattccccgcaaggctcgccccccctgacagcagggacacaagccccccaacgaccaagcaacaaaaactcgtcattctcaatagtgatatcatgaaattaccgataatcgaatgataggacataccctactgtataaacgttcaaaacggcagaattttgtctatggattgcgacatggcgccccatcttttgcttagaccatttcgattatttatgataaagtccggctcacggatgggtttaaacgacaaatcaaggaaacgaaatgccgcctcctggagggaacgcatccaagatggagaaatgtcttcccgttcccagacagaacgcaaaaaaaggccccttccccgtccatcctatcccgggttgccgcaggaaaattctgatccggccgtcattcccggccctacccgcagaacgggaaattcccgcaacggtccttcccggtatgacacgccgccccagcgacgagcctcccgcccgtctccgaaggaagagtacgaagacaatccggaaagagaagaagaaaaacgtcccgcacgcgcaggaaccatgcgcaggccgcgtttcacgattttcggagccttgctgtttgtcctgctgatgccgttccgcttcatcggctccctgacgcggaatatccgctggttcatttgctggcccctgcgcatccttctgggatgctgcttcgtcggcattgtgatcggggccatcctggtgtttctttacggcaccatttccaaccgctatgacatttccgaggtaaagagcaacatcccggaacgcacggtgattctggaccgtaaaaaccggaccatcggaaccctgcacggggaaaaccgcaagcgggtatcccttcaggaagttcctcccgtttttattgatgccctgctcctgcgcgaagacaaccgcttttacgaccatggcggcgtggactggataggcgtgggccgcgcctttgcgcaggtgctcaagcacaagagagccacgcagggggcttccaccctgacgatgcagcttgctaaaattacatataaccaccgggagcgcaacctgcattccaaactgacggaagtggccctggcgaaacgcattgaagccacttatacgaaggacgaaattctggagacttacatcaaccgtattttctgggggcacaccttcctggggatagcggcggcggcgcggggatattacgacaaggaaccccgggatttatccctggcggaatgcgccaccctggccggcattatttacggcccaaatgatttttcccccatcaaacatccggaggaagcaaaaaaagtgcgcgatattgtccttggcctgctgaaaaacgaaggcaagattacggaagtgcagtatcaggcggccctggcggagcctatcgccacccggacgccccagtcccggtctgaggaaaattacgccatgggtctcgtgcgccgggagctggacgccattctggaggaagaagacatccgcctgggagggctggtggtgcataccacattggaccttgatctgcagaacgccacgctggacgccatcaataagcacatggacgcgctggaagcccgcaaggatttcaagaagcacctggcttccctgcaggccaagagggagaagaggggaattctgaaaaacaagctgaccaccaaggcggaatatgaggcctccctggccgcctggaaggcgctccctgcggaacagaaggaaaagacgcaaccgccgatgcccaattacatccaatccgccgccgtagtcatggacaatgccacgggggctcttctggccgtcgtcggcggccgggacgcggaagaatccaagctgaaccgcgccattcagtccaggcggcagaccggctccctgttcaaacctttcatttacgccacgtttttccagcagggcaattctgcggatacccgcatttcggatgacaggattgcctacggggaaatacgcggagccgccaactggtccccccgcaattcggacggaacgtaccggggcatgaagccggcctccttcggtctcatcctttcccgcaacaccatgtccgtgcgcatcggcaaccgcgccggtttgtccaatgtcattcaatccgcacaactggcgggcttccacggaaatatttcccgcaccccggccctttatctgggcacgtgggaagcgtcccctctggacattgccagcgcctacagcgtttttgccaacgggggcgtacgccccacgccgtacatcattgaccatattacggattcccagggccagccgcgcttcgccatcaccaagagcaagcgcaccgtctattcccagcgggcggcgaacattacctcttccatcctccagcaggtctgcaagcccggaggcacggcaggcaaaattaccacgctgggctttaaatccccctgcggcggcaaaaccggaaccacgaataattatacgaacgcatggttcgccggatatacgtccaacctcacctgcagtgtctgggtggggtttgattcctccaccaaaattctggaaaaaggctacggaggcaccctggccctgcccgtctgggtggacattatgcttgccgcccagaaggaaggctatcccgccaacgccatccgtacgcgtcccggttcggaagggcaggccgtactcgtctgccgggaatccaatcaactggcccattccggctgccagtacgccaagactgcgtattttgaaacctccgcaggctaccaggcccccgccaacatgtgtgaacggcacattcccatggcggaaccggattcggaagagagcattccctatgcggaaccgctggacggcagcgacgataacatccccctggccgaacccgtggaagaaacggacggcatcccctacgccacccccatctgattgcttattttttccttatgatttccccattttttccctggttcctggcctttttgctgctgatcgcctgcgtggcgctgctggttctgctgctgcggtaccgggaccgctccgtccgcctcgaagcggaatcccgctcctggcaggaacgggcggaggacagaacccagatgctccgccgggcggaagaggtgctgaaagattccttcgccggcatcagcgcggaagtcctccggaactcggagaaacagtttctgaacctggcggaaacgcggctgcaaagccagcgccagcaggccaaccatgacctggattcccgcaaacaggccatcgagtccatgctgaagccggtgagcgaatccctgaaactggtccagtcccggctgggagagatggaaaaggaacgcgtgggcgcctatacggacctaaaaacgcaaatccgctatatcctttccggcaatgaagccctgaaaaatgaaaccgccaggctttcccaggctctgcaccacaacagcgttcgcggccaatggggagagctccaactgcgtcgcgtggtggaactggcgggaatggtggagtactgcgatttcacgactcaggaaacccgttccagggaggaggaacgggtgcggccggacatggtcattcaccttcctggaggccgttccatcatcattgacgcgaaagcgcccatggcatcctacctgaatgccgggcagacggagaatccggaagagcgcagccagtggatggcccgccatgccgcggacgtcaagaggcatttgcagcaattaagcgccaagaattactttgcccagttttccccatgccccgaattcgtcattatgttcctgcccggggaatcctttttccaggcggctctggaagcagacccctccctgattgaattcggcgcggagaataaagtcattctttccaccccatccaccctgattgccctgctgaaagccgtcgcttacggatggaagcaggagcagctggcggataatgccaagaaaatttcggaagcgggagcggacctgtacaatacctgctctatcctttccggtcatttttcctctctgggcaagagcctgaatcaggcggtagcccagtacaacaaaactgtttcctcttttgaacaccggttcatcccccgggcccagaagttgaaaaatctgggcgtcacctccacgaaggaacttccccgctccctggaagacattaccgaacaggccaaatctgcggatgttccggatactacgtcctgaaagagcggcaacaatacgtctttttcccttcctgcccatttccgagccgggaaaatacagctctaaggcatcccccgcaaacgctttcctgcgcttgaaagcatcttggagatgtagaggaattcagcctccgacggccctgcacttcccggaattttcaacaattcctatgcgcggcaacgggaaacggcaggctgctttcatcatgcagccgggcagataattcccccgcggcggcgcacaccggcacccggaaggcatccagagcggaacgggaactgtagccccaccccaccagaataagccgtgttccggcgttcacggccgtgttgccgtcatgggcggagtcccccaccatgcacacctgcgccggctccctgccccaggaacggacgatggacagcagggagtcaggttccggcttgcgcggaaagcgttcggaaaaacccatcacctcccggaagggaatttcaggcaggatatggcgcaccagcggcaccgtaaccgcatggggcttgttggataaaacgcccagaggatggccttctccggccagggacaacagcatttcccggatgccggggtacggaaccgtgccctcctgccaggtgtgcgggtattcacgcatgaatccccggtgcaccgcttcaaaagcttcctccggcacgtttccgttgaaatagcctttcagggaagccaggcaaagctcccgggcccccttgcccaccatttcccggatggcgtccacggaatgctccggataccccagcgctttcaaggccaggttcaggccgcgggcgataccgggaatggagtccaccagcgtcccgtccaggtcaaaaacaaaacccgttttcatggattcaatggcagaacccccgttcggaagtttccacgaattggatgattctcctcaggcaggcattttccgcataccccgaatgccgcagttcctccagagcttcatgaacggtcagctttttattgacgaaaagctttttatagcacatgcgcacggctttcaggtcttcttcggaaaagccgcgcctctgcatgccgatggagttaacggaacgcgttacggccgggtggccctccacgatcgtgtacggcaggacatcctggctcacgcgggccattgctcccaccatggcatgttccccgatgctcacaaactggtgtacggcgcaacatcccgccaggatggcgtaatcccccaccgtaacatggccggcggcggtagcgaacccggagaaaatcacatgattgccgatctggcaatcgtgcccggcatggcaggaaaccaggaaaaggttgttattccctatccgcgttgcgccgccaatgtccgtagcccggttgatggtggcgttttcacggaagacgttgttatcccccacttccagataagtcggctctcccttgtatttcaaatcctggcttttcaggccgatgacggaaaacgggaaaaattcgttgccgctgccgaaggaagaaggaccgtctataaccacatggctgtgcagcacgcagccgggccccagtttgacatgttccccgacaacgcaaaagggaccgattttaacatcatccgcgatctctgcagcaggatgcactactgccgttgggtgtatttctggcatggctgaaacaagtatgaaacaaattcaggtgattaaaagcctaaaccccgcagggccgtctttttatcacatttggccggaagcggccgcataagcctccatctcaggcagccagggaatcagcagaacgtagatgagttgaaggcacagaatgatcagcaccaacgtcatcaccactttacggagcgtgagggagccgttcagcacatccgtagtccccagcttcctgtcccagggagtaaaaccgaaacggcgcacccaccaccaggaaaaaaacagggccagcagcatcagggaaggagcaaaacaccccagaccaagcaccatgacgaacagggagcgccggaatgccatggggaaagaaaggcgtcttccccggtagtccctgacggaaacgcccagcatggcttttcccggggttgtacccaatgttccaagaaatgcagtttccatgagaaccatcgggaggcagaggtaaagcagagcttcataggaaccaggaagaaaaccgggattgaaagcagcgccggataccctgagcacagccaggtacagcgtcatgtgcatcattacatcagccattctgccaagaaaacggacgtacgcatacggaaccaccagcggcactccctcctccgcgtcctcccctccttcttccggcaggcaatccgcatctgcggaaagcgccgggacatcttctccccctgcgttttccagcctctcttccctcccgttccgccgttccccttcttctctgccgacggcacctgctcctttcaatgccggaaggtcacggatgcatacccactccgggcatccggcatgccacgcccgggcgttttccggaatgaggcccgcctccagcatggaaatgacctccacttccggcagaggccccttccgttcatgatcctgaatccagtaaatatccataggcgattcctgttacatactgcgcagggagcgggccggatcctggcgcgccgtgatcagggcaggaatgatggatgccaccacgaccatgacaaaagctttcaccgcctgccatgccagctccgcccagtcaatcaccaccgggatattcgccgtgccgtggaaggccacagggaacgggtcaaagcctattcccgcaagaaaaccctgaatctgcatgcggtattccagcaccagaagccccagccctacacccaggagagctcccacaaaaccgatgatgacgccctgccacaggaaaacgcgcaccacctggaacggcgtggctcccaaagccttcatcacggcgatttcctttttcctctggatggaaacggtaaacatcaccgccatgatgcaaaaagcggaaatcagggagatgaaggacaggacaaagctcatcatcatgcgctccttctgcatcagttcaaaccacgcgttaaagcggtcatgccaggtttccagcgtccatgcggaagaaggcttctccttttccagcgcctgcatcacgggggccagcatcgtttccacatggtaagggtcttccacgcgcagggccacggcctgcaccacgtcatcctcataacccagcaattcctggccgatgaccagcggaatgaaaagatccgggctgggcgtatgctgggaggcccggtaaattccgatcacctccaggtctttcggcatcaccagctccttgattttccggaagcattccatatccgcctcatttcttgccccggccttgaaaccgctcaaaacggtttcccattccttccgcgttccttgcggaaaggccaccctgccgttgtccgcaatttccccgtcgttcagcacggcaagcagatccatcaggctggaacgttccgcatccctgcgcgggacggacaacagcccgttaagcagggaaaacgccttgtccacggaggctctgccggccatttcacgctctccctccgtctgcaggttctttccccactccttcaaatccttgagttcccgcgcgtttttttccgccagcatcggcagttccgtctgctggtaggcgtgggaaatttcctgaaaattgcgggtcgtataaacccggacaacatctcccacattcaatcccatgttctccgccacgatggaggaaaccacagccttttcccccatgtccagttccgcatcgccagctaccaccaaacgcttcaaatcctccagctgggcggcgttttccgtatcaatggcccggaaaaagcagggcctctgccgcccctgcacatccaccagcgcatagtcttctatcagggcgtaggtggactggacgccgggaacgtgcctgagtttctcccccaaatccatccagtccggaatcacttccctcacgccgaagtcgttccggtagcatacctggacgtgcggggagtgcgcaaacagattcccctgaatttccttctggaggcctcccatgacggacagcacgacaatgagcaccatcacccccagagatacgcccagcaggcaaatcagggtaataatggaaaagaaagtccgcaacgggttcaaataccgcagcgccaggctcaggctgatgtaccggctcaataggttcttcatgaataacgcggcacaccttgcctgatcccgctcccctttccaagcctaaaacatgttccggggaaggagatcgtttacctgcctccggcaccctgccattccaggcacagccagcgggccatggaggcgatcacccggtcacaagcggattcagaatcctttgaatccctgatgaacacggaaaccgccattttccggccgttgggaagaacaatgatgccgacgtcattgcgggcggtaacgccaccccccggcagcgtgaatccggatcccgtcttatgcgccaccacgtaatcccgcggcagctgccctttcagacgttcagggcctgtagaacatcccgccatgatgttccaaagaacactctgtgtgccttttttcaaaattttaccttcgtcaaacgcccggagaagggagttcatggccgacggacggcttgagttgacatattgcaaatcatgattccggtgtatttcttcttccgtaaaacggacattaatgccgtcaattccccattccttcaaatccttctgcacggcctgcggccctccaataaggccaaacaggaggtcgcaggtattgttgtcgctttcctggacagtcactctcagcagttccttcagagagaaatcgccgccttgcgggaaacgctcccggagggggctccaggtatctttcaccagttgttcctgacgtatgcggatgatctgttccagattcatggcgccctggtccacccgcttcaagacggacaaggccagcacgaatttgacgacgctctgcatgggataggccgcctcatcccccaccatgacggtttcccccgtatccagcatttccgcagccatgcccacacgggccttcagggaatgggccagttcgcgtacggcggaggaatccgctgcggaaacggctggcggagaagacgtggccccctgagaaaaaacgcaaaagaacatgatgcaaccgcatagataaacaccgctggaagtcataggcatcattccataccacgcccgcagcaaccgcaataataatttctcccccttttttcctttcttcgtcatccgcaagccgggcagaaaccttgccacctgtccggcctcctgataaaaaggaaagcatgccccatctcctttcggaaaccctcgtctggtgcgtcaccctgctgttattcggcatggggctgatcggcacgctcatccccatgcttcccggcattatgatcattgcggccgggtgcgtctggcagggagtcatgggcagagaaaacctggcgtggtgggaatggaccgtcctggcgctgctggtggcgggaggcatggtcattgacaagctttccggaggcatgggcgccaaaaaattcggcagcactgccgccggcatctggggagccatcatcggcgccgtcgcggggagcctcctgttctcccccattacgggccttttgttcatgccgttcctgggggcgctgctggcggaacttatctttgccagaaaggatatcatgaacgctttcagagccgggtccggagcggcgcttgggatgcttgccggtctgctgctggaatttacctgcggcctgctcatcatcgcctggttctgttcctgctgcttcctgttttgatgccgcgcccggcggaagtttccggcaggaaaagcagacatttttctgctgctgaaaaaaacacagtttccccaacgtattcagttaaacgccgctctacacgcgcatccgtccgaacggacgggttctcccattccctcattttaccagcttatggatgcacctgttccgatacccgtcgccatgatggcaggtttcatgattcttggagccattctttccatggggaaatgttccttcctcatcgcaggctacaacatgatgaacagagggcagaaaaagcaatatgatgaacaggcgctgtgccggttcatggggaagatcatgtactgcctcgccttcgccatgctgctctggctcgccagcatcattttccagaactccgtgctcctgtccgcctccctgtactttctggtgggaagcattgcatttgcggtcatttacgccggcgccggaagccggttcaaaaaatagcgttttttacaccagctttcttttacttttattatacgcaacattatcttttcccatgaacgtccctgcaaccttgaaacattccttcctgctctgccttttcgcggcagccgtccccctccgggccattccggcccccatgcaggtcaccgcctccacccccgcccgggtatggacggaaggatacggcacgggcaacggaaggctgggcatcctctctttcggcgtttttccgaaggaaaccgtcgtcctcaatgaaggaagcattttcgcaaagaaaaatttccaaatgagggaaggcgccgcggaagctctggacaaggcgcgcgaactttgcaaggaaggaaaataccgcagtgcagaccagctattccgtaagaatatccttcctcccggcaacattgcgggggattaccagcagggggggcgtcttcaggtggaattccaggggcttccttcaccttcctcctatcagcgtacgctggatatgcggcggggcaaggcaaccacccgcgcccaattcggcacgggggaattgaccacagaaatcctggcggccccgtccagcgaatgcgccgcctaccacattgcctgcacgatgccgtccggatgccgcgtttccctgaatctggaacacccggatccgtccgcccgaattgttgcgcagccgaatggctgggtgctggaaggacagggaagcaacgggggcacccggtttgaaaacacggtggtcattctggcgcccggagcctccgttacccgcaaaggctcaacaattattcttgattccgcccgggaagtgctggtactttcatccatttccacagattacaatatccggaagccggaagctcccctgacgcattccctggcggctaaaaacgcgcgaatcctggcaaaagcgcaaaaggcgggatggaaaaaactggcggcggaaacggaagattatttttcccggctcatgacgcgctgtcaggtggatctgggggattccccagccggagtttccgccatgaccactgcccaaaggctggagcgggtcaaacagggaaagaaggatccggatcttctggaacagcttttccagttcggccgcttctgcacgattgcccacaccaggccggggcagcttccctgcggtttgcagggattatggaatccggagctgagggcggcgtggatgggctgctatttcctgaacatcaacagccagatgaaccagtggccttcccatgtcaccgggctgggagaattccagagttcctatcttgattttgtccgcagcctgcgcccccacggagaggagtttgcgcgcttcatcaaacgggacggcttctgcttcggccactatacggattgctggaagcgcacctatttttcaggcaacaatccggaatggggggccagcctcatgaacggggcatgggcatgcgcccacctggtggacagttaccgctttaccggagaccgggaagaccttaaaaaatcgctgcccattctggaatccaacgcgcgtttcatcatgtcctggtttgaagacgacggcgagggccgttacctctccggcccgggggtgtctccggagaccggattttacgcgccggacggcacaggccccaacgtgctttcctatgtttccaacggcacgtcccatgaccagcttctgggcagggaggctctccgcaattatatctacgcctgcggagagctgggcataaggactcccaccctgcttaaagccgtccaatttctcaggaaaatcccccagcctgccatcggtcccgacggaagggtgcaggaatggaggcagccttttgaagaaatgcagaagggccaccggcacatcagccacctttacggcctgttccccggcacggaatgggatgttctcaatactccggaatatgcggaggccgtacgcaagtcagccgatttccggcgcaagtacgcggatatgggaaacaacggcatcaggacgggatggagcacggcgtggctcatcaatctttatgccgcccttggcgacgggaacgccgcagaggacaggatgtacaccatgctgaggcactacatcaactccaacctttttgacctccatcccccgttccagatagaagggaatttcggcttttcctccggcgtggccgaatgcctgatccagagccggatcatgcaggacgggttccaggttatcctgctggctccggccctggcagacgactggaagaaggggtctgccacgggattgcgcacgcggggagggcttaaggtggacttgtcctggcaagacggccgggtgcaggccacggctaccgctgcgcgtccgggcaaattccggttcatgcatcagggccggaaaaaggatttgtccatgaataagggagaaacggtgcgtcttgattttcctccgctttcccattaggactcccctttctgcgttacctcttcaatttccgctatgcatttcttttccatgactttcaggctcggtctgctcatagtggtggtctgcatcgccctcagctcctgttccaagcttttttctccccgcggaagcggagaaataccggacacggaccaaacggaaacgctcctgaaagcgcatgtattccacctggcggataccatcggtgaacggaacgtctaccaccccggctccatggagcgttccgcccgctacattgaacaaaaactggagggaatgggttatgccgtcacgcgccaggctgttcatatcccgccctccggagaattcggcgccgtaaaggactggacggcatataatctcatcgccatcaagaaaggaacctccccccagcccaaaatgctcatcgtcggcgcgcattacgataccaaagtgggcatggacaactggcacgaccacggtcctgcccggccttcccgcaccggaactccgggagccaatgacaacgcttccggcgtagccgccctgctggaaacggcacgtgcccttgcagcaacttcctccctccacgatgtttgtctggtggcctacgccaatgaagagcctcctttttaccagacgcccgccatgggcagcgcagtacatgccaaatccgtctcccatcattcgggcagggaaaaaatcatcggcatgattgccctggaaacgctgggctgctattccccccgggtgaataaaaaacgccaatccgccgtggttgccggattggccggcctgccggaccgctgcgactatgttgctttcctctccaccaacacgggccgcaaactggcacgctcctgcgcggaggaattttccgccttgagccgctttccggtgcgttccgccgtgttcccgtattacacccgcggcgtttcctggtctgacgactggggatacatgaaggaaggcatcccctcctttgccgccacggatacggccttcctccgctgcgacgattaccatgaaaccagcgatacggctgaaaagctggactatccccagtttgcagaagtggtgcagggcctttccaaactcgtcatttcactggccaacaaaccatgaacaagaaacagatattattctccgcgctttttctgacattcgcctgcgcttcagccggggccgctccgcctgagccgtccgcgctgggcgccttctgccctccctcagagggaaaagcctttcactccggatggatttccctggggctcaaagcggcggacctgaaagaaaaacaagcctccgccggacacattacggacgtaggggaagcgcaaatccagcttcactttcccgccggatggagtccgcaggacaggcgcacggccctgtgtatttttccgggaggggggtatgccatccaggccattgaaaaggaagggagccgcattgccgactgggcggcggaacacggcatggtgggggttgtcgtgaaataccgcgtttcaggaaccagcaatgccctggggaagtttcccggtcccctgctggacgcccgccaggctctgaggaccgtgcgaaaaaacgcctcttccctgggaattgaccctctccgcatcggcgtcatgggcttttccgctggcggccatctggcggccatggcctctacgctgtggaaccgcaccctgccggaagaagcggaaaatccgctgaaaaacatttctgcccgtccggatttttccatgttcatttatcccgtcattaccatgacgccccatactacccacgggggaacgcgcaacaaaatattgggggcccatccatcccctgccctggaggagatgtgttccgcggagagacaggtgacggagcaggcgccgccggtgttcctcgtccacgctctggatgacggcgtttcctgcgccaacagcaggctgatggaacaggcttgccgggaaaagggggttcccgccagtctgaacctctatcccacgggaggccacgggtatggcatggaaaaacgcggacatcccacggatcaatggcctgaagccgccgaacaatggctcagggaacagggattcctttcttccccggtttctgcccgcgggggtacgccctccggagcgggcacttcctccggaacacggcgggaatgaatgtgctaggaccggcgtgtgccgcatcgcagggttgaccggaaccgggcccggtggtactttttccgggcatgagtgcgcctgaaaagaattacaaagacaccatcctgttgccggagaccggtttccccatgagaggggatctgacgaaaaacgaacccgtacgcctgaaaaagtgggaagacaccgggctgtacgaacgaattttgtcccgcaggatggcacagggcgcaccccggttcctccttcatgacggcccccccttcgccaacggggacgtgcacatgggtacggccctgaacaaaattctcaaggacctggtcctgaaatcaaaaaccatggccggttatgccgccccctatattccgggctgggactgccacggcctccccatcgaattcaaggtggttcagaaggcccgtgacctggatgcggcggaaatccgccgacgctgtgcggaattcgccaaaggcttcattgacattcagcgcacttccttccgccgcctgggcgtgttcggcgactgggagaatccctacctgaccatgaagccggcgtatgaggccaacatcctgcgcgtgttcgccaaactggtggaagacggagcggtgtaccagagccgcaaacccgtccagtggtcctatggggcctatacggcactggcggaagcggaaatcgactacaaggaaaaggtcagttcctccgttttcgtgcgcttcccgcttctggacaatcccctgggcctgaaagcatccatggtcatctggaccactactccgtggacgctgcccgccaacgtaggtctcgcactccatccgcgtttcacctacgtggcaggcaggttcatgaaaaacggccagacggaaaacctcgtcatcgtcaaggatctgctggatgccttcgctcagaaaacgggctgggctcttgcggaaaccatccgtgaattcaagggagccgaactggaaaactgcgaggcccgccatcccttcctttcccgcacgtcaacaatcatcctggcggactttgtcaccacggacaccggaaccggcatcgttcacatcgcgcccggccatggcgcagacgactatagcgtggggcgccaatacgggttgcctgtcctctcccctgtggacgatgacggcaaatatacggaggaagtgggcgtgccctccctggtgggcaaacatgtctttgacgccaacaaggacatcatttccatgctggaacagggcaacaacctcttcggcgtggaggaataccgccaccagtacccgcactgctggcgttccaagacgcctattatcttccgggccgtggaacagttcttcatctccatggacaagctccgcccgcaggccctggaagaaatagacaaggtgcagtggctgcccgcctggggccgcaaccgcatttacggcacagtggaagccaggccggactggtgcatctcccgccagcgcacctggggcgtgccgctgcccgtcttctttgatgaaaacggcaaagccgttctggatgccgccctggttcgcaaaatcgcggatatggtggagaaacacggttccaacatctggttcgaactctccgatgaagacctgtgcgaacgcctcggcctgccgaagacctggaagaagggcaaggatacgctggacgtctggattgattccggcagttcccatatggccgtcatggacagccgccccgggctggatgctcctgcggacctgtacctggaagctacggaccagcaccgcggctggttccagagttccctgatgctttccgtcgcctggcgcggcaaggccccgtacaaggccgtgatgacccacggcttcgtcgtggacaaggacaccggaaaaaaaacctccaaatccgacgccaagagcggcaaacccattgacgcggcctattactacgacaaatacggcgcagacatcgtgcgcctgtgggccgcctccgtggactggcaaaatgaagtccccttcggggaagacctcttcaaacaggtgacggaaccctaccgccgcctccgcaataccctgcgcatcctgctgggcaatatcagcggatttgacttcgccgcgcaggcggtcgccccggaacacatgcccatcctggaccgctggattctggaacgcctgaacgccgtcatcagggaaacgctgaaggcctatgaagcttatgacttccgcaaagcgttcagcgccatcaaccagttctgcaccagcgacctgtccgccctgtacgtggacaccaccaaggaccgcctgtactgcgacgcttcctcctccgtgcgccgccgcgccacacaaacggccatgaccattatcttcaaggctctgtgccgcctgctggcacccatcctggccttcacggcggatgaagcctgggaatacgcgggatatgaaggcagcgtgcatgagcaggacttccccgcccccatgccggaatacgatacccaggaggcgtcctccgtcatttcccgtctccaggaaatcaggtccgtcatccaggtagccattgaagaacaagtgaaagccaaggtattttccaaaaataatgaggcctccattaccctgaccgttcccgtgaatgagagcgaagacgtagtggcgctgctggaagaccgggcgtttgccacggaatttttcatcattgcggaccttgacgtgaaaaccggtccggaactggcggcctccgctgcaaaaacggaacatgccatgtgcccgcgctgccgccggtatgaaccggctgcggaaggcggggacgtatgcgaacgctgcgcggaagttctttcctgaaccgcatccactccatttcccgacctttatatggacccccagacggaaaaagaacccgccccccataaaaagacgcctcccggctggctctggtggagcttgctgggcgcagggctgtatgtgctggaccaggccagcaagctgtggattatccgccgcttcccgctgaactacctgaacgaaaagctccataagtacgcctacctgccggactttccgggcttctctcacatcaatgcggacggcacgctggacttcgccacgaacggacgcatgccggaggcggaactggcgaggctcccgggtctgaatccaaacacggtggacgccctgaacaaactgagggaactggaacccatctcctttctggacggaaccatgaacattacccgcgtgcacaacacgggcgttgctttcgggctggggaacggcaccgtctggtccagctatcttttcctggcagttcccgtgctcgccatcgtagtcctggtcgtgctttaccggaaaaacctcttccatacggcatggctcaagctggcctatgtcctgctgctggcgggcgtagccggcaacctgacggaccgactgattcaggggttcctgattccgtatgagcaacagcacggtttcttcaccaagctgatgaacggttacgtggtggacttcattgacgtcaccatccccctattcaactaccgctggcccgccttcaatgtggcggactcctgcatcttcgtagcggcaattattttcttcatcgccagcattttctccgccaagaataaagaagaaaaaacatcctgaaacgcccatgaccacccggctcgttattctgtcaggactgcttttgtgcggaagcctcgcctccggcaaaaatgaattgtccttcaaggaaacggtggttccggtaaaggtggctccggaccaggacagcatcacggcatccttccccttcaccaacacttccggcaccccggtcaccatcagtaaaatccacgtttcctgcgactgcaccaccgccggagcgaaggataacaagctgacgtatgccccgggggaatccggcgtcatcagcgccgtaatgaaaaccggcaatttttccggcaccgtggacaaggacatgacggtgcacgccaacggctctgcctacaagctggtaatacgcgcgcagatcccggacatcatccggatggaaccccgcaagctggaatgggccagaggagaggccgctgtgcccaaaaccataaaaatcaccatctccaaagaattgcccgtcaacctgaccacggtggatttgacgggagacgcctttgactacgagcctgtgaccgtgaaaaaaggcagggaatataaaatcatcgtcactcccaaatccacggccaggccggccttcaacaccatctgggtgcgcacggattccgccgtgccgcgctacaagcgccaaatggggttcctggccatcaaggaaaactgacatccgcccttctttccatgagagacgccttttccaccgctctgaaactcctgctggccgtatttctgctggccgtaggcgtcgccgcgctggatctgcgcgtcatccagccgttccgcacgccgccctgcaacccggaaactctggaggaagggcacgtgtgcctctcccaggtattaaaggaatggccgggaaaaatcctctggatagatgccagaaagcaggacgactttgaacgccataccgtcacccaggcccccgtttaccccatccgcccggcggatgccaattaccaggaactcctggcaaatgccatggaagccctgatgacggcagaggacaagggattctgcatcgtcatcttttgcagcagggactgcacctccagcgcggccgtggccaatgaactgaaaaagccggaatacggcatccgcgcgcccattttcattctggaaggaggctgggatgaattgcgcaaagaaccctcactcgtaccatagccatgcttgacacagcaaccattcgcccgcagttccccattctggaaaccagcgtgcacggcaagcctctcatttacctggataatgcggccactacgcaaaaacccctggccgtgctggacgccatccgtcactactacgatacggagaacgccaatgtgcaccgcggctcccactacctgagccagctcgcgacggaagcgcatgaagaatcgcgggaaacggtggcgcggttcatcaacgcgccggaaacggcggaagtcctgttcacctccggctgtacgatgggcatcaacctggcggcggataccatcgccgggtccggcatggtcaaaccgggagacgaagtcatcgtaaccgcttccgaacaccattccaatatcgttccctggcaaatgctgtgcgaacgcacgggcgccgtcctgaaagcggttcccctgacgccgggccagaccctggacatggaagcttaccggaacatgctttccccacgcacccgcatcgtagccgtgggacacgtttccaatacgctgggaacggttaatcccgtgagggaaatggccgcgctcgccaaggagaacaggcaggaaaccatcgtgctgattgacggagcccaggctgtttcccacatgaatgtggacgttcaggaactgggctgcgacctgtatgccttttccggccacaagctgtacgcacccaccggcatcggcgcgctgtggggaaaaagggagctgctggaaaaactgccgccgtggatgggcggcggggaaatgatcaaggaagtcacctttgaaaaaaccgtttacaacgacatcccgttcaaatatgaagcgggaacgcccaacattggcggggcagtgggtctggcggccgccatccgctacgtctccgggctgggcctggacaacattgccgcccatgaacagaaactgacggatatggcggtggaaggcctgaaggccatgccgcgcctgaccgtactggccccggacgtgccgcacagcgccgtggtctccgtcctggcggagggcgtccaccactatgacctgggtacgctgctggaccagatgggaattgccgtaagaaccgggcaccattgctgccagccgctcatgtgcgccctgggcaccaccgggactacccgcgcctcctttgccctgtacaatacggaagaggaagtgcagaccttcctcaaatccatgaaccgggcgctggacatgctctcctgaatcaccctcccttccctgcttattgacaccgcgcatcatgaaaacggtttccatccttctcttaggactggccataggcctttccggctgttccctgcaccagcggcaggaaatggagtacgcccattaccaggatgacgccgcggctatccgggaggcccatgccgcatggctcattctttcctctcccaaccgcagccgggaatggccggaagcccggaaaaaatacaatgcgtgcattcgggagctggccgcccacctgaaggaagccaaacgcaaaggcggcatggatgagaagaagcgcctgagccttcccttcgtcattgaaaaatctccctatgccaaggacagcaatccgtggttctatgaggctattttcatgtccgatgaagtggaccccaccttccgcctgcgcgaaagcgtgacggtggagggaatgggcataccgctggcggggctggcgccccggggcggttcccgcccccatgccaacgtgcttaaggacaacggcaacgtgcacacgctgacggccattctggactttgaccgcatggtggacgggaaacctaccctccgcaccattccgcgcctgatgaatgagcacatcttcattggcaaaaacaaggtgcggcagcctctggcggccaatttttccgtccccatcgctctcttctggaagctttccgacgcagacgggacggaactgctgggggcattccgccccaaaaaggccatcaatacgatggggctttatttttccgaaccctatgacccccggaaaatacccgtggttttcacccacggcctgatgtccggccccgccaccttcgctaacctgaccaaccgtctcctggtggatccggtcatccgggaaaactaccaattctggttcttcggctatccgtccgggctggcctggaccattccggccagcaggcagcggcaggccctgaaggagctcatgcaggaatacaatccccgcgggacatccagggaaatgaacaacatcgtcatggtggggcactccatgggcggcctcatcacccgcttcaataactccaccaaaccctggacgctgatgaagggactctttgaacttcctccggaaaccttcgcaggcatgacgatgggaaactggaaaaacggactggcgcccctgaactgtgacgaacatacgcttgaacagctccagaacaatttcatcttctccccgtccagcaacgtcacgcgcatcgtgtacatggccaccccgcaccgcggttccactttcgcggacaactggataggaaggctgggacagcacctgatcgacctcccctcggacatgctggaagaagtcacccgcatcgccactctcagccgcggcatgttcctcctcaaccccctgcaactgaaggacgagctgaccagcatccgccagctttccccgaactcatccctggtcaaatacatgtcggagctgcgcggctccccaaatgttcccgttcattccatcattggagacaggggaaggaacgacactcccaattcctccgacggagtggtcaagtaccactcatcccacctggactggagcgccagtgaaaaaatcgttccgtccgggcacagcgtgcaggatgacccggcctccgccgtggaactgcggcgcatcctccgggaacacctggtcaaggtcaaaggccgtaaaacgctcgaagaagcggacgcgaaagccgccactcccgtatggcaggccaatccctcgccgcctatcatcctgaaaaggccctgatgcagggggctgattctccttgtccatgcaaggcctccttcccttcccccttctgttgttcctgctgatagcggcagccatcttccagtcaaacggccacgcctcggcgatcctgtttccgggttcctgtatgtcccggctttaacggctggagcgccctcgttcatccgccctccctgccgcttccgggaaaaacaggaaccggacaggatttaccttgccgcgggcatctgcggcaacatgccgccgcggttgaaacaactgaaattttccctgctcatcacggcctgttcctggctgccctgatttgactggccggttagggaaaagggcgcgctccatccgggcatgattggcgtccgttcagcatcagggcgtcccgacatcaaaatatgcccgcttatagagttgcttccgtaggggaatttaaggtagagtgggaatcaatactattccacctcccttttccatgtctgccgacgattcctttcccatggaccagatttcctctctctttccccaattggaaaatatccagcttgtcggagccaaaggcccccagcaaattttcgcagctaccctgaaatcaaattttgctcccgttatgctgcgggtggttcccacggaagaagccggcatcttcggctgggatcctgaattcatcgtccgctccctcaccatcgtggaacaatcccaccaggggctcctgcgcgtttatgaagtaggacaggcggggccgtttactttcatcatctccgaacactccccctatccgcgtctggcggatatggaaacccttccccaaatatctccccaggcggcgctcaacctggtgcgcaacatggcggaaggactgctgacgctgcaccggaaaaacatttttcacgggggcatcacgcccaagctgatttgcctgcgcgaagacggcggagacgccctgctgctgcccatcaacatttatcccgcccaacctccggtggacatgggggacttcgcctctccggagtgggtcaccggagcggaaaccacgttcacgccgggcatggatatttacgcactggggctggcgctttacattctgcttacccgcaaaacgccgatggaagcgggctttgccatgccctcctcactaatcaaatgcagcgatgccgtggattcggcagtctcccgcgccatcaatccggatacccgggaacgctaccgggacctgggggatttcatcacggatctggataaagccattgccaatcctgcgggaagaaatgcggcctccatccctccgccgccatcttccccggccattccggccctgaacatgcaaaaagggcagtccaacatctattactatctcattccggccctgatcgtgggcattgtgctgacctatacctgcatcctgtataagaaggatgtcgttagaatgcgcaatgattataatgaacaggtgcaaaaggaaaataacgcgaaagcggaagcggcaagacaagcgaacagggacgcgcgccgccacgctccggccaccgcgcaaaacgccgctgcggccattccttcacctgttccggccgcgcgtccggcgcaggcgccggcagttcccaaagtttccgcggaacccggcaaagtcaattggagccttcaacccggcgtcaaggttcgccagagttccaaccgcaacatgctgggagcttacggtccggaaaaggccgttgacggcaataccagctccaggatttccgacgtttcaatcagctccacaggcgtggttgagggaaaaaccgcctggttcggcattgacttcggcagggagaccaaccgcaccatagaaaaggtggtcatttacacgccggccaacctgacgctgctgggcaccatggaaaaattcaaggtaatcctctacggcaatgacaaaaacgtgctggcggaaaaaaccttcagcaccactccttcggaaaaatccaccaacgtcacttcctggaaactggacgctccggtcaaggcgcgagccctgcgcgtggaatccgcaaatccctcccagccgctggcgttgacggaagtggaagcgtacggaccggaagatgcggaggacacaccggctcccgcacctgcggaaaaataattatccgcgcagccctgcacccgctccggaggctatgctgaaaaccgccgtttcctttccccttcccggaaagcaggttggggcagggcctgatggaatgtcacgcgctaagttccgggattggcttcgcgtatgaaattttccggtttctgctccattctccggaagccatccaggcccggacggaggaaaatccgaaaaacgtatttgctccggaccggaaacagccgcccttctccaccttccccaccccggaaaaacgctctcatccccatatggctcccagggaaatatcctgaagcggctgtcgtccctgtggacctctttcccactcaggcaaaacaatactccggaaataaaaaaacccggcgccgcctcacggcgggccgggccagcaaaatagcaattcttccgattaccggttggcagacttcacaatcatggcatccttgccgatgcggccgcgcagatagtgaagtttggcgcggcggactttgccgcggttcacgacttcaatcttggcaatgcggggagtatgcagggggaatacgcgttccacgccttcaccataggaaattttgcggacggtgaaagcttcattgatgccggaaccgcgcttggcgatcacaatgccctggaaaatctggatacgttccttgccgccttcaataacacgagtgtgaaccttgatggtatcacctacgttaaatggggtcacatccgccttgagttgctcttgctcgattttgttgataatgttcatcttgtgttatctattgctggtgaatatcagtaaaaggaaaacttacgggacgcagaatatgagccataatcccctaaaaggcaatccaaatttgccatacgtccttaatttattttttcggcggggccggcggcggagccaccctggcaagccattcctccagcgccggaagaaaagcggaggaagacatgaggccccggatgctgtccgcccgctgcagaaaggccttgttgccgccccgggcccgttccgccatcaggatttccagcagcaggcgcgcgcgggtgcgggcgtcagccgcgccgtccagggcggaggaaaggagctctccggcgcggaccggttccttccggtacaggcattccagcgccagagcttcataaaggcaggaaacaggggccttccgggcggactccatcaaacgcgcggaacggtccttccagcggtctccgaactgcacggaggaagcccaccacccctggaaataacggtcttcttccgtcggctccacgtccatatccttcatgcgggcgtatggacggtacagggggtctccgaacaccaccccctgccaggacagcacaggcatgctcatccaggaagcctccgccacggtatagccgtccaggaggcggtccacaaaaatatcaaagcggtggcaggcgcccaggaacggctcatacacgtttcccaccgtcacagcagcccccttctccagcagggcggaactccatcccctgccggggaccttgaaatcggcggcgctgaaggaatgcagatgcatggctatcgccccgggccggaagcggaacgaaggatccgaaaacggtccgttcgcattccccgcataccacccgcagtaaagagccgtatcccggctcaaggggaatttttccggcagggtctggggccagtcatccagataagcgggaatgcccgcctccctcacgcgctcgaacacgtcgtccagccaccggtccccctgggcataggggccgccccggtccacaacggcccacccccataaaccttttttctccacgttcgccggttccgccaccagccgcatgcaggtatcgggcgtcagtccgtccaggcggcataccagaaacgaaggaaggccggaacccacaaaatcctcccttttattaaaatagggattcacctgccaggacttcctttcataaccgcccaccgccagcagagccagttcggaatccaccgcagcgcgatccgtctgcatctggttgacgcctttcccgggaaggggagcgggcgtttcatgccgtatcttcatcggcaggtccgccatcagcaccagcacaaaaatcttccggttcatcaagggggaggacgcaatgccggaaggcacccaccaccgttgtttccgcgccgcctccagcagcgggacgcggatcgtatcctcatactccttccgcgaaatctcgctggtcatggggcaatccagggaaacgagattcccttccggaacgccgcgcacccgcgcatactccctggccatgcggcggctcagctcggattttccgttataaaccacggccacatgagcgggcagcagctcataggcacacgaggcggaaaaccacgacgccagcagaaataacacggctaatccactcttggacatgcccctaccatacctcatcttccggggcaatcaagcaggtgaaaggggcggccacgaattcgccatttttccgcttttcgcttcacatcctaaaaaaatacgctttaataactcttgatgtattgcaggcctcccccctgcattccctataaccatcacacgcatatgattcagcaaattgaccatatcggcatcgccgtcaagagccttgacgccaccgtcccctattaccgcgatgcgctcgggctcggagagccccacattgaggaagttcccactcaaaaggtccgcgtcgccatgtttgacgttgccggagtccacatcgaactgctcgaacccacctctccggaaagcgctatcgccaaggctattgagaaaaaaggggaaggcatccaccacatcgctttcaagaccaatgacatcgccggaaatatctcccaggccaaggaagcaggccttaccgtgctgaacgacccgcccgtccccggcgctcacaacacgcaggtcaccttcctgcatcccaagtgcaccttcggcgtcctgaccgaattctgccagcaccccggcggctgcgaatgcggcaagtaacattctccctattcaccataccactagaccaatggctattgatcccaaattgattgacgatctgaacagccgccgcaagaaggtcatcctcagcggcggtcaggaaaagatcgacaagagacatgaaaagggcgaaatgacagcccgcgaccgcatggggtacctctttgaggaaggcaccttctcggaaatcggcatgcatgtgcgccacaactgccacaacttcggcatgggtaagaaggaaatccccggcgacggcgtcgtttccggtttcggcctggtggacggccgcccggtagcctgcgcggcttccgatttcctggcccagggcggttccctcggctacatgcacgccatgaaaattgcggatgctcagaagtatgctctgaaagccggcatcccgatggtgaccgtgaacgactccggcggcgcgcgcctccaggaaggagtggcggccctttccggatacgcccaggtgttttacaacaacgtgcttgcctccggcgtggttccgcaaatctccatgatcctgggcccctgcgcgggcggcgcggcctactcccccgccctgacggacttcatcatcatgcgcaattccggcaacgcgggcatgtacatcaccggtcccaaagtgattgaacaggtcacgtatgaaaaatgcacgatggacgacatcggctccgccgccattcacgccaccgtgtccggcaatgtccatttcgtagcggacagcgacgcgcacgccatggacatcctgaagaggcttctttccttccttccttccaacaacacggaagaaccgccccataaactggacactccgctggacctgagcgctgacgaaggcatgagcgacctgattcccggcgataaccgcacgccgctggacgtccagcccatcatcagccgtctggtggacaacggggacttcctggaagtacacaaggacttcgcaaaaaatgtcgtcgtcggattcggccgcatctgcggcgtggtggtcggcatcatcgccaaccagcccaatgtgaaagccggctgcctggatatcgattcctccgacaaggccgcgcgcttcatccgtttctgcaacgcgttcaatattccgttggtgaacctggtggacgtacccggcttcctgcccggcaagaaccaggaacggggcggcattatccgccacggcgccaaacttatcttcgcctattcccaggccacggtgcccaaagtcaccctaatcatgcggaaagcctacggcggcgcctacatcgccatgtgctgcaaggacctgggcgctgacgccgtcttcgcctggcctggtgcggaaattgccgttatgggtgcggaaggcgccgtcccggtactctacggccgcgaactgaaggctgtggaagacccggcggaaaaagccaagcgccagggcgaacttctggaagaataccgggaagccttttacaacccgtatgtggcggccggcatggggcagattacggaagtcatcaatccggaagaaacccgcgccaaaatcgccttcgccctgcgcaccctgctgaacaagaaggaagtgcgcccggccaagaaacacggcaacattccgctctaacatccatcccaacggattcatatgttacttacaacactcgcttttgccttcgcacagggcatcgccaacgttatggacaatctgaattatcaggttgtcggcatcatggtggttatgctgtgcctgggaggcatggccgtcattctgaccgtcagcggctccatcgccgccgccattcagaacagggccaaagccaaaacagccgctcccgtagccgtgcctgccgccgctcccgctgcggcgggcaaaccgggcatgactccggaaatgctcgccatcctttccgccgccgtggattccgccatgacggagcttacgccggaaatggtggccgtcatctccgccgccgtggacgcaggcctggacggcatgagccaccgcatcgtggaaatcaagcaatccccgggttccggctatgcggccgcgggcagggcggaaattttcgcctcccaccgcatccggccttcccgctgaactactgcattattcacccttaccccgcccaggcggaaccatttaacttaatatcccataccacacactattatgaagaaacttcgcatcaccgtagacggcaaagtatttgacgtatccgtagaacttctggaccaggtgtcctccaccactgcggcgccggcccccgcacctgtggccgctcccgctcctgcggcttccgcacccgtggccgctccggccccggctcccgcacctgctccggctccggccgccgccggcgcaggagacgttcccagcccgcttgccgggaaggtcgtctctctggacgtggcagcaggcacccccgtgaaggccggtgaccagattctgacgctggaagccatgaagatgaacaccatcatctacgctcccgcctccggcacgctcaccgctttctgcgtgaacccgggcgacacggttcaggaaggacaggcactggccaaaattggttaatcccggcggcggcagcccggaaacgccaacagtcccgggctccggctcagataataaaccgctacaaaaatattccctatgagtctttttgattcattaatcacctttttacaggggatgggcgtcttctccctatcatggcagatggtagggatgtggggcattgccattctcctcctgtatctgggtgtagccaagcaatacgaaccgctcctgatggttcccattgctttcggcgccctcattgccaacattccggataacggaatgctcatcacccagctgaaccagcaggtcatctcctccaatgaacagggggaagtaaccgccacgtctctgaacaacgtggggtacctgcgcgttcacgtggctccgcttcagcaggctccctccaaggtgccggccaacctgaccacgcctgaatcccgttcccagtatcaggaaatcatgcagcagcccatgcaggtttaccccggcagccagctgactgtttccaagatcaagtccgtgcgggaatcccaggaaaaagcaaaagctgacgcggcccgtctgggcgacgacagcctgacggtggaccccaacctgaaggatttccagaacgtgacggaagacaacggcaatgaaccggtctttctgctcacgaacggagaagggaccaccgtcgtccgccagcagggcgtcaattactttgacaccagcggcaaccggattccggtggatctgaaaacccagaagctggagcccctggtggtttcagccgcaggcaaatacgtggccgtaggccagcatacccaggaactgctggtcacctccatccacgggggcctgtatgactggatcgggctgggcatcaaggctgaaattttcccgcccatcatctttctgggcgtaggagccctgacggacttcggcccgctgcttgccgctccgcgcaccctgcttctgggcgcagcggcccaggtgggcgtagccgccacgttcttcatggccctgttcatggggttcaccccgaatgaatccgcgtccatcggcatcattggcggcgctgacggccccacctccatcttcctgacgatgaagctggctccgcacctgctgggcgccgtggccgtggccgcatacacgtacatgtccctggttccgctgatacagccgcccatcatggcgttgctgacgaccaagaaggaacgcctcatccgcatgaaatccctgcgaacggtcagcaagagcgaaaaactgttcttcgccgtgctggtaaccattgtcaccattttgctgattccggacgcatccccgctgatcggcatgctgatgcttggcaacttcctgcgcgaatgcaaggtgacggaacgcctggttcaggcctcccagaatgaaatcatcaacatcgtcaccatcttcctgggaacctccgtggggctcacgatgcagggcgaccgcttcctgcagtcggaaacgctgctgatcattcttctgggtatcgtcgccttcggcgtggcaacagcgggcggagtgattgccgccaagattatgaacctcatctggcgcaagaatccggtcaaccccctgatcgggtccgcaggcgtctccgccgtcccgatggcagcccgcgtctcccacaatgtgggccagaagtacgacccctccaactacctgctcatgcacgccatgggtccgaacgttgcaggcgtgatcggcaccgcagtcatcgcgggttactacatcgccactctggcgaaataaccagaattgaaaattactcccggcctcggcccgtcccatgaattccgcagcctcattttccacccctccggaggaggaaggaccatgcggcgactggacttatcatgaatgggccgaggctttttccaccaatgatctggcccgagccctccccccggggcatattgccgtctgccgcgttcagacaggaggccgcggcaggttcaaccgcaaatggataggggaggaaggcggcctgtgggcatccttcaccgtccccctgtccgctcctgaggatacagcggccggcgtgcactggggccatttgcccctggttgcggggctggccctgttcaacatgctccgcggcatggggctggattccgtgcgcctgcgctggccgaacgacctgctggcgggcaaatccaaactggcgggaatactggtggaacgcccggcggagaacatggccgtcatcggcatcggcatcaatgttttcaatgatgtatcctccatcgccggggaaatcaaggaccctccggcaaggctggcggatcttgttcgggactgcccttccctgcacgccgtcatggcttccctgggcagtcatttgaaccaggttctttccgtcttttcccacggcggcgtccccgcccttcaggaggggctgtcccgggcatgggccggagaaaggccggtttccattcttacggatgacgaaaccgtccggggcatttttacagggattgacgatcagggcaatcctgtgctatcccttccggccggcaccgtccgcaccattccggcgcacctgatcaacaggctcctcgaagaatgagcctgccgctccgtttttacacggggtttctttcttttttcatccaacaaaaatcactgacatgagttacaaggtactgacaccagaagaagcagcaagcctgatcaagcatggccaccatattgggctgagcggattcacgcccgccggaacggccaaggccgttacggctgcgctggcaaaaatcgcagaagcggaacatgagaaggggaaccctttccaggtgagcgtcttcaccggtgcttccactggcgattcctgcgacgggatcctttcccgggccaaggcaatccgctaccgcgctccctacaccaccaacgttgatttccgcaaggcggtgaacaacggggaaatcgcctataatgacatccatttatcccagatggcccaggaagtgcgctacgggttcatgggcaacgtggacatcgccattattgaagcctgtgaagtcacggccgacggcaaaatttacctgacggccgcgggcgggatcgctcccaccatctgccgcctggcagacaaaattatcgtggaattaaacgccgcccacagcaagagcgccatgggcctgcacgacgtttacgaacccctggatcctccctaccgccgcgaaatctccatcttcaaacccagcgaccgcatcggcaagccgtacatccaggttgacccgaaaaagattgtgggcgttgtggaaaccaactggccggatgaagcccgttccttcgccgcagcggatcccctgaccgataaaatcgggcagaacgtggccgatttcctggctgccgacatgaaacggggcatcattccctccacgttcctgcctctccagtccggcgtaggaaacatcgcaaacgcggtgctgggcgccctgggccgcgacaagacgattcccgcgttcgagatgtacacggaagtcatccagaattccgtcatcggcctgattcgggagggccgcgtgaaattcggcagcgcctgctccctgaccgtgacgaacgactgcctggaaggcatttacagggatatgaactttttccgcgacaaactggtgctccgtccctcggaaatatccaacagcccggaagttatccgccgtctcggcgtcatctccatcaacaccgccattgaagccgacatttacgggaacgtcaactccacgcacattggcggcacgaagatgatgaacggcatcggcgggtccggcgacttcacgcgcaacgcctacatctccattttcacctgcccgtccgttgccaaggacggcaagatcagcgccatcgtccccatggtttcccaccatgaccatacggaacatgacgtcaatatcattattaccgagcagggggtcgcggacctgcgcggcaagagcccgaaagaacgggcccagaccattattgaaaactgcgtccacccggattacaaaaacatcctctgggattacctgaagctgtccgacggcaaagcccagacaccgcaatccatcagggccgctttgggcatgcacgccgaactggccagaagcggagacatgaagaatgtcgactgggcccagtataagtaattccgcatgccgtcattcgcattggcatccatgaattcacgttaacccctcaggaccgcttccgcaaagggagcggtccttttcctttttcccatcccctctactccttctcttcaccatgaactggatgatttacccagcagccagggctttcatcaaagtctgcgccgttcttttcggcgcgggcgcagcagcggcagtcctcatccatctgttcatgccttttttcctccgctctccccggacagccgcacccttcctgcttttgggcacaggggcggaattgctctccatcctttccctgtccttcctcatgttctggggcgccagagtcctgctggcctcccgcggaagcagaataacaagaaatctgagcatgctggccttcctgcccgccctgtacgccctcctcattccgtttgcgggcatgcccgtcccatcgcaatatacggaaatggacagggtttgggaggccgtcctccttctgtcggccgtcacttctttcttttccttcccttatacggcgggatacggtgccgcaagcaggagattattcctggcctggggcatcgcagcggcaggctgcggtttgcagagcgccctgttttttcttgccgtcctgttgcgtcagttcctgtccaccgcagttccctccctggcagcgcctgttgcatggctggccgttcttctgtcctgcggcctggaaatcatgctggcgaccctttccgctattctggcgcagcgcctgtttaaagaggtcatgtccatagcatccatgccggaaccgattgatccttccatgccgggcaaccgtccctgactttcctcccctccgtttttaccggcctgccggaagagcaccctcattccccggcatgaaaggcttttacggctttgcgcaaaaagccgtccggaaatttccgccggtggaacggaatccgtatggaaagcattgccggaaagcaacccgccccaccccggaaagccgcgggttcgcagggacacccctcccgtttccacgccggcggcagacaaccctatttcaccaattcatccagataacggccataaccgttattattcatggctccggcctgggagcgcagcgtttcctgggaaatccagccgttattaaaggctatctcctccaggcaggctaccttgaacccctggtggtgctccagagtacgaacgaacatggaagcctccagaagggtatcgtgcgtgcccgtatccagccacgtatagccgcgcgccagtttttccacgcgcaacaggccctgcttcaggtattcctgattcacagaggtgatttccaactcgccgcgggaagacttgggaatccgtttggctatctccaccacccggttgtcgtaaaaatagaggcccgtcaccgcaatatccgatttgggcctgagcggtttttcctcaatggaaaccgccttcccctcctcattgaattccactaccccgaaacgctgcgggtcatgcacctggtaaccgaaaatggtcgctccgctcgtcagttcggcggccctcctcagcttctccgtcaggccgcgcccgtaaaaaatattgtcccccagcaccagggcaacggaatcctttcctatgaactcctctccaataataaaggcctgagccagcccctccggcctgggttgttccctgtattcaaaggaaacgccgaacctgctgccgtcccccagcaaatcccggtacaggggcagatcccggggcgtggaaataacaaggatttcccgtattccggccagcatcagcacggagatgggataataaaccatcggcttatcataaacgggcagcaattgcttgctgacggaaagcgtaacgggatgcagacgcgtgccgcttcccccggccagaacaatacccttcatatcaaattcctagccattggttccaagacgttccaagcggtattccccggacaggatgccccgccaccattcctcatggtccagataccactgaatggtctttctgaatccggaagaatggtcctggcgcggagtccaccccaattccctccgtattttggaagcgtcaatcgcatagcgcaggtcatggcccggcctgtcctgcacaaaggagatttgctcccggtagctccggccgtccggacggggccgcagttcatccagatgggaacacagcagctccaccagctccagattggttttctcgttattgccgccgatgttgtacgtttcccccggttttccgcaggaaacgaccgtcaacagcgcctcgcagtgatcccccacatacagccagtcccgcacgttttcccctttgccgtatacaggaatgggttccccgcccagcgctttcaggataacgacgggtatcagcttttccgggaactggtaggggccgtaattgttggaacagttggtgatcagcacgggcagcccgtacgtatcgtgccaggcgcgcaccaggtggtcgctggaggccttgctggcggaatacggggaatgggggcgatacggcgtggactccgtgaacaggccttcctttcccagggagccgtacacttcatccgtggaaatgtgatgaaagcggaaacgctcctttttctctccctccagggaacggtaatattccagggcggcctgaagcatggaaaaagtgcccatgacgttggtggtcataaaatttcccggatcgtcaatggaacggtccacatgggattccgccgccaggtgcatcacccagtccggagcgcactcccgcaaagtgcgccgcatcagggaagcgtcccggacgtcggcgtgcagaaagcggtatgccggagaatccgccgagccgtccagggaatggatgttgccggcataggtcagggcgtcaatattcaagacttcatggccgcgctccagcagcagcctgaccagattggagccgatgaatccggcgccgcccgtaacgataactttcatagcactgttttcagggaaagatgcggcgccatcatacagcagcggcgttttttttcaaaacaaatccgcccatgccgcgggaacgtggcggcatgggcgggaaaaagcgggttccgtaaccgctgagacggctagcagctcagctcccggcaaaggttgatgatatcctggttcacggagtactgctgcccggctacggaatccagggaggcatagccgtactggccgtcatgatacaccatgatctggttgatgtccccgttgttcagagcttccacggcgcgggtggcaaaacgggtgcccatcaggcggtcacgggcggtgggggaaccgccgcgctgcacatggcccagcacggtcaggcgggtatccatgccggcgcgttccgtcagccagcgggtcaggtactgcgccacgcgggtgccttccgccaccacggcaatgatgcagcttccttcctcattgatgacaggctggagtcgcttgtaaatggattccaggtcatacggaatttcagggacaatgcagatatccgccgcgctgcaaagagcggtggtcatcgccagatagccgcagtcccggcccattgtttcaatcacgaaagcgcggtgatgggaacgggccgtatcacgaacggaatcaatgcaatccagaatcacgttctgggccgtatccacgcccaggcagtagtccgtgccggcaatgtcgttgtcaatcgtggccggaataccggcaaaaggcacttcaaaatcattgaaaaagtcgttcagggcgcggaaggaaccgtccccgcccatgatgatgagcttgtcgatgttgcgttccttcagatgttcgtaggcctgcttgcggaattcgtagtcgaaaaaacgcttggatcgtgaggaacggaggagagttccgcccctgtagatcatatcgttggtcagttcccgggtggcttccttgatttttccatcaatcagcccttccaagccgtcataaacaacgtacgggttcatcccaagctggcgggcatgatccactgccgccttgatcgccgggttcattccggcggcatcgccgccagatgtcataatggctattccactcataagtaataaggttaacttgtccggggggaaatgttaccgggcggaacaaataatgcaagcgcggagtttttactggcgcaataaacggcaacgcttcatgatgcggaggcatgaacgacactgcagcagccattctgaaagccacggccgccctccgggacggcacggagaagctccggttcgaatccccggtccatgttacctacaaccctctcacctatgcatgggggccgcatgaacagtatgtgcgcacctacggaaacggggaaaagggccatctgttcctgggcatgaatcccggccccttcggcatggcccagacaggcgttcccttcggggaagtggacgccgtcgtcaactggctgcacatccgcggagaagtcgggcagccggaacatacccaccccaaacgtcccgtggagggcttcggttgccccaggtcggaagtcagcggccgccgcctctggggacttttcgcggaagctttcggcactgcggaaaacttcttccgtcacaattacgtggccaattactgtccgctgatctggatgggagccaccggagccaacattacgccggacaaactgccgtcggaacagcgcaccgccgtggacgcggtatgcatggaacacctgctttccctcatcaccatcctgaatccccacacgctggtgggggtgggcgcctacgccacgcagaagctgcgggacgccgcctcccggctcccccgcaaaagcttcaccatcggcacgttgctccacccaagccccgccagccccatcgccaacaagctctggccggaacgccccatccagcagcttaaggaactgggcattttataaaaagagcggaggaagtagagcgggaagctccgtgacatggaaggaatcaccagagcgacaggccggaaatcggcagttcatcgtgttcccctccaaatctacatcgctttgaaggaatgtccggccccctttactggcttgatttgcccagggacacggctttcctgacggaagaaatgcacgccggcatctaccggaacagagaagaacttaaacgcctccccacttccaccacaaaaatcagcctccctccaaatcaatcatcattcttagactgaaaaccctccgctctcccccgcaggcctttttactggacagggagaaaagggttccgtacagtttccgcgatcttcaagcgttccgaatttatggcaatttcagattacatcgtgaccattggcctggaagtccactgccagatcaagacaaagagcaaaatgttctgctcctgcgagaccggctttggctttgaacccaatacgcgcgtgtgccccacctgcctggggctgccgggcgctctgcccgtcctgaatgagttcgccatcgaacgcacgctgctgaccggcctgatgctgggatgttccagcccggagatttcccaatgggaccgcaagaattatttctatccggacatggctaaaaattaccagacctcccagctggatcttccgctgtgcctgggaggggaagtgcccctgtacccctggtcctatccgaatgacgtgatcaaagccggcgtcccccctttccgcaccgtgaagctgacccgcatccatctggaagaagacgcggcgaagattacccatcatgccaattattccctgatcgactacaaccgcgcggggtccgccctgatggaaatcgtttccgagccggacatcgacaccccggaagaagcctacgcctacctcaagtctctccagcagattctgaattacggggatatctccgacgcggacatggaaaagggccagatgcggtgcgatgtgaatatttccctgcgtccccacgggcagaaggaattgggcgccaaggtggaaatgaagaacatcaactccatgtccgccgtccgcagagcccttcattatgaaatccagcgccaggcggaagaactggacatgggcattcctcaaatccagtccacccgccgctgggacgacgaacgcggagaaagcgtcgtcatgcgaaccaaggaagacgcgcacgattaccgttatttcccctgtccggatctggttcccgtacgcacggccccgctggtggagaaagtgcgcgggcagattcccgaactgcctcaggaacggcagaaacgcttcatggaagaatacggcctgagcgagtacgacgccaacgtgctggtgggagacctggaactggcacgcttttttgaagaggcggcgcggggaaccgccagcggcaaaaaaatcgccaactgggtgattaacaacatttccgccgtgctgaatgaaaaaggcatgcgcccgtctgaatgcccggtgaaacccggcgccatccgggagctgatcgccattattgacgacggcaccgtttccaacaaccaagccaaggacgtattcgccaaaatgtgggatgagccggccctcgccgcagcgcaggccgccaagctgctgggcttcgaaaaggcggattcctcttttctggacggcatcgtgcgggaagtcatttccgccaatccggacaaggtggcggaaatacaggggggcaatgaaaagctcctgaactggcttaccggccaggtcatgaaggccgtcaaaggcaaagccaacccgaaaatcgtgacggaagcgctgaaaaaagccctttccatggagtgaccacaaacaaagagccgacgcccttcccggtgtccgctccttgcccgcagggcatcacggtttgaacagcttcctgtttccggccagggtgttccatacctgcttcacttccccggccagcgtctgcttcatcatggcaagggaaaagtccgccgcctggcccatactgatgtagggaggcagggcaagggcgtccctatccacatgcgcgtccagcagagcggcgcccggataattcaggaacatgtccaccatctggtccacctggctggatttgtccaataaaaaccccttgatgccgacggcatccgccacggcggcaaaagaggggttgttcaggttgatctgccacggaatcagcccggccgcctgcatttccaattggatgaaatccagacagtcattgttatacaccacgattttcaccggcagcctgtactggacaatcgtgatgagatcccccagcagcatggacagtccgccatctccgcacagggcaattacctgccgttcggggtattccatctgcgccccaatagccatcggcatggcattggccatggagccatgattgaaggaagccagcgtcctcctgcccggcgtagcgcacaggaacctggcgctccagatgcagggggtgccggtatctaccgtaaatacggcgtcggatgccgcatgcctgttcagggcggtcgtgagctgttccggccggatgggagactccttgtcatttccttccatataggcgttcatctccttcacgtccctggcgtggcgtttcagggcggcgtccaaatgcccggaatccgtcttttcctgcaccatgttcagcagagcctccgccgtgacggaaacatccccgcaaatacccaggtccaggcggcagcggcggcccagcacttcaccgcgcctgtcaatctgcacgatttcaggtttggtgggaatgaaattgaaataggggaaatccgtcccccacaacacgagcatgtcgctttcatgcatggccttgtaggcatctccccatcccagcagccccgtcatgccgatgcccaggggattgtcatgttcaaaataatcctttcccctccatgtgtaggcaatcggagctttcaggcggtgcgcgagccggacgaccctgtcttccgctcccgcgcagccggcgccgcagaagaaagtaatgcggcggtggtcgtcaagcatccgtgccagaagggatacggattcatgctcaggaacaacattctcccgcgtgtaggaaggaggatgcaccagattcttcatctccgcaggggcgtccgcaatgtctccgggcaagacgacgacacctacgtcgcgcctggcccacgcgtgctgaatggcggacatcaaaatggacggggcctgggaagcttccgaaaccagttccgcatatgcactgcattccttgaaaagctgttccggatgcgtggcctggaaatattccatgcctacctggctctgcgggatgtgggaggcaatggccagcaccggggcatggttccggtgggcgtcaaacaggccgttgatcaaatggaggttcccggggccgctgctgccgcagcatacagccagattcccgctcagctgggcttccgcgctcgcggcaaaagccgccacttcctcatgccgcacatgaatccattcaatggtcttcctcctcctcaaagcgtccgtaacggggttcaggctatcccccacaatgccgtaaatccgcttaactcccgccttctccaaaatttcaacaatctgatcggctaccctgtacatgcagattagacaccagccaacctccaacggatttattcttatgtgtcatcccctccatcttttccgcaccggaaaaaatgcctgaggatttcccctgatatcataaagccgccgccttttcaggcagcggcctatgaattaccagttctctggtagaaaaccgtcaggaacggcggcggcgcatcatcagaacggccaggcccaggattcccagagaagccgaggccggttccggaacctgaaggccggcaaaaccggcaatctgttccgcggaaagttttgtatccgtccactgaatttcaccccatgtaagattgggattaatccagctttggatatcagagcgatttccgttcatgttgccgttgtaggacaacgtgtcaagcaaggaaccattcacatagacatccacagactggctttggtttgcgccggtaacggctagagtcacgttaagaagacctccctccaaaacaacgggagtttcagaaacgtctccacggttttgggaaaaagagccggtagaagtattcaaatttccatctcccatgccaagcttggcatctgtcgtcagatacaaggcatttgtcccgtaactttggcccgcattggtgccataatacccaaacagcgtggtctgggttccttccgttaaggaagaagtatccagccagagggagatcgtgtaattggaagcataaaaattaccgccgtaaggaatggaactgccaggaagggcactttgtgagagacttccaaacgtcatgtcttttcccaatgcaataccttcagttgtcgtcgccgtaccggcagcgtaagacgttccgtccgtcggctcaacaaagccgggagacgccaacgccggaacggaacaacacgccgcaatggccattaatgctaatgtttttttcattttctatgtatgatggattgagtagcaattagagagatattccccgccttctgtatatcggattcccaatccgctctttttcccccccataggaaagatgagaacaagctttttcaatccgctaaaaaatgtaatataattaccttctatcacttatgaatataaaaaataaaacgcagaatagattttttgtggaggctctgaagttgctgttcaggaacagcaatcccttttcgcaaaatagaaaaaattgtaataatagtttcatatctgaaatgttaggttgacctcggattgggaatccggttgttttccctcagccatcaaaaaaagcaacataaggttttcatattcaataaaaatcaattttcttcccctttatttccaggacctttttcttgaaaaagagccttccccaaattatcctcccgctagctgtaatattatttcatcatgaaatttttcaagacaaccattgccatggcaaccctgctgggctgcctgcccacatcccccgcagaagtcgcctttccggggcctgcacctggaacagccagcgcggaacaatccgcttccggctatactctttccaataatatcctgacggccaaatttatccttcggaacggaagtctttccttcggaggaatgacttccaaactgggccccgtcgccaaggcaggggatgaattattcatcatcaatcttcaggacggacggagcattaaatcctccgagctgaaagcgggaaacgtcaaattcgtctcccttcagcccaaccccaaggccttcaggctggctgaccgcttcccgggaaaagccgtcagcgcaacattccaggctctgaacggagcccttcgcatctcctggcgcgccgtactcagggaccattcccactacctgcggcaggaactccgcctggcaagtacgaagcccgtccagatgaaaaacatcgtagcgatgcaatatgacctggcagaagggaaagccggggcaccctccgtttccggaaacgccagaggagcactcatcgtcaatgacctggcgttcaccgccctggaaactcccatgggcatcaataccgtgggaggcgccggaaatatggaagggggagaaaccgccatctggagcgcagataagtggtccacagcctcatggaccggaaatttcaatgttccccaggaactgaaaaagcagtacggagaacaggtttccagtgcggaaggcccggtttccattgacggcaaaggagcatgcaccgtcaccttccagtataagggaggggacaagggcaacaataagctgaaccttgccggcgtgcagctcctctcttccaagggggccattcttgactccgatttccacaacggcagcaccggagattccaatgccggcaacacttacacggtacaggttccctccaggggaaattacattctgcgctactgggcccagaccaagagcgaaccgattgccagcaagggggaaatcaccttttccctgcccgtgcgcacgctggaggaaaagcaggaaccccaggcggacgaatcccggctggcccagggactctggagccgtaaaaccaccttgcagcccggggaaatatgggacgtatcctccgttctcggaatttttgcccccggccagaaacgccgctccttcctggcttatatggaacgggaacgcgtgatgccctaccgccccttcatccattataattcctggtatgaactgaacatcaaccgcaacaatgattcggaccccgccaagcgcatgacggaagaacaatgcctggccgtcctgaaagactggcaggaacagtttttccagaagcgcggcatgtccattgacgccttcgtctgggacgacggctgggatgaattcaacagcctgtgggatttccacaaaatgttcccgcagggcttcaagcgcattgacgccgccgccggcaggcaaaaggccggcatcggcacgtggctgggtccggtggggggctacggagcctccaagggcaagcgcctcgcttactggaacgtgaagcatccggacaacaagatcggcaatttccagctctccaacaaggaatattttgacgcctttgtgggccgctgctcccagatggtgaaggactacaatatgaagtacttcaaattcgacggcatcagcacccacttccatgccaaggggcccggcaacgaagaggatgcggaaggcatcatccgcgtgctgaacgccctgcgcaagaaaaagggggatctttacatcaactgcactgtaggaacctgggcatcccccttctggttccgttatgcggattccgtatggaggcaggagaatgacttcggcaccatcggagcgggcgacaaccgcgacaaatggatcacctaccgcgaccgcctggtgcatgaagtttttgtgcagggctccccgctgatgcccatcaattccatgatgactcacggcctgatggtcactaaattcggtcctccggcctgcatgccccgcgatccggaaaacgtcaagaaagaactccgctgcgccacggcttgcggcacttccctccaggagctctacgtggatcgggacctgatgagcgccaacggcggagttctgtgggacgaactggccaaggggatcaagtggatacgccgcaatgcggacgttttggacgacgtgcactgggtgggcggcaatccgtggaacaaggaaactaacgaaggggccgtgtacggctgggccgcatggaataaaaacaaggccaccctggctctccgcaattcctccgaccaggaaaagagcctgaccggaaccctgcgcagcattctggatatccctgcgaacgtcaagggctccatcaccttcaaggattcctatgacgaccagcggacgctggacggcttctccggcagttccgtagacattgacaaggaaatctccttcacgttgaagccctttgaggtgctggtgtacgaagggggaaaggtcaaataaatcagccggcccacacgcccggtcaaagccggaacggcgttgaaaaaaacatattgggggaggcgggattcccgcctcccttccttgttcccgtgcgggcagaatccgggtcagaatgttttttcaaacgtcaccgcttccagcggatcggcagggttgaccggcatcaccaggcattccgcaccttccccgcccaggtacaacatcaggctcctgccgggagaataggcgatggagacaccgtaatatcccccttttttcaccagggaccaggttccgcggcaggaagaaacgagatcttcctccagcacggaaaggtcctccctctcttccggacgggcaatccacctgccccatgcctccggacggggaaaggaagaaatctcgcacgtcccgtcttcattcaggaggagcgtggaagaactgacctggaaaaaacgcttcaactccggagggcggaaaaaccgcctctccctgggagatggttccacctcatactttccggaaagggcctgcacatccggctcatgaatccacaggaaagctttttgacacaccgcctggcggcacgccagccccaccacggccagcagggaaaggaacgccaggacaaacgcccacagggccagccgctttctccaccacgcataaacggcggccagccccgccacactgcccgcacaaacccagaacccccaggaacgggaaaggaaggccagggcatccgccagcacggaaaatccatgagaaagatcattccacataggtgctccagaatctccggaacatagtcaaagtcaagacaacaatgccgcctttcaaggcacgggcctcaggctgcgccccgctaaaaaactcccgtcatcactcctgaaaatattcctccgcgcttttctcacaggctccaatcaggtaagaagcatctgaaccatgaaaagcgcagcacatcatcaggggctttcggaacagcaggttctggaaaaccggaccagatacgggatcaatatcctgactcccccggaaaaggaacccctgtggaagcaatttctggagaaattttcagaccccatcatcaaaattctgctggtggccctgctcctgtccgtaggcgtggctttctaccagtttttcaccggaacggaaccggccagcgtcttcctagagcccgcgggcatcctggcggccatcctgctggccacctgcgtggggttcgccttcgaggtaagcgccaacaagaagtttgaaatcctgaaccaggtcaatgacgacaccatggtccaggtcatccgcggcggcaatatctgcgaattgccccgccgggacgtggtggtgggcgatatcgtcatcctgaacacaggggaggagataccggcggacggcgtcctgctggaagccgtttccctccaggtcaatgaatccacactgacgggggaacccctcatcggcaaaaccacgaatgaagcggaattcaagaaggatgccacctacccctccaaccacgtcctgaaaggaaccaccgtggcggacggccacggcgtcatggaagtgacttccgtgggtgacaaaacggaatacggcaaggtttatgaaggttcccagatcgacaacaaggtgcagacgcccctcaatcgccagctttccaggctgggcgatctcatcacctgggccagctacgccatcgccgccctcatcgtcatcgggcgcctcaccctgtatttttcccatctgccgggccccgtggaatggctgagcgcgggaacctacattctgaataccgtcatgattgccgtgaccgtcatcgtagtcacggtgccggaagggctgcccatgagcgtcactctgagcctggcgctgagcatgaagagcatgctcgccaacaacaacctggtgcgcaagatgcacgcctgcgagaccatgggggccgccaccgtcatctgcacggataagacgggcaccctgacgcgcaaccagatgaacgtgtacaaggcggatttttacgggttggggaacgccgtcccggcggaagacgagccgggcaacctgatcagggagggaatcgccgtcaactccaccgctttcctggattacgcagacccggaacatatcagggccctgggcaatcctacggaaggggcgctcctcctgtggctgcacgggctgggcgtgaattacctggacctgcgggaaaacgcccgcgtgctggaacagctcactttctccacggaacgcaagtacatggctaccgtagcggaatcccccctgctgggcaaaaaagtcctttacgtgaaaggcgcgccggaaatcgtgctgggtctctgctccaccgtcctgactccggaaggccaggtacccgccgcggacatgcgccccgccattgaggaacagctcctggcctaccagaaccaggccatgcgcacgctgggcttcgcgtaccgcattctggaggatgacgccccggtgttcgaggacggccgcatcatccgcaaagacctggtttacctgggcatcaccgccatttccgaccccgtccgggacgatgtgccccaagccgtgaaggactgcatggacgcgggcatccgcatcaaaattgtcacgggggacactcccggcaccgcacgggaaatcggccgccagatcggcctgtggacggaggaggattctccggaccgcctgatgacgggagtggaattcgagcagactccggacgcggaactgctggaccgcgtgatggatctgaaaatcatgtgccgcgccaggcccatggataaggaacggctggtcaaactgctccagaagaaggaccaggtagtggccgtcaccggggacggcaccaacgacgcccccgctttgaacgccgcgcaggtggggctttccatgggagacggcaccaccgtagccaaggaagccagcgccatcaccattctggacaattccttcatgagcatttcccgcgccgtcatgtgggggcgttccctgtacaggaatatccagcgcttcatcgtcttccagatgaccattaacgtggcggcctgcctcattgtgctcatcggcgcattcctgggcacggaatcccccctcaccgtcactcagatgctctgggtgaacctcatcatggacaccttcgccgcgctggcgctggcctccctgccgccggacgaacgcgtgatgcaggacccgccgcgcaagaccacggaccacatcatcacccgccccatgggccggaacatcctgggcgtgggcatcctgttcgtcgctttcctgttcggcctgctgcaatatttcaagcatgcggacattaccagcctcacgcagttcagcctctgcggctacttccgcagctacctggatttttccgccccggaacatgaactgacgggttatgaactgtccctgtttttcaccattttcgtcctgctccaattctggaacatgttcaacgccaaagcattcaacacgcaccagagcgcctttgcacgcatgggcgccagcattggcggcttcggtctggtagccctgcttatcctggccgggcagtacctcatcgtcacctttggcggaaagatgttcaacgtggtgcccctgagctggacggactggggcctcatcttcgcaggcacctcccttgtcctgtggttcggagaactggcgcgggcattcactccggataaatccggcgcccgctcctgaaccgtccgggagaattccccccgcgcatgacgcggacggcgacgccgcccggaaaaccttctttcaacaaaggcgcccgcaggcgtgtcattcccagcatggacttgacacgcctgacgggctctatctccagccccgccgttttcctcttcctgctttccctcttttttgccgggtgtaaaaagacggaacaggttccgcatgaaacgcccacgcttatttatgaacaccccgtcaccatggatattccggtgacgggcagctgggtgggccacctggacggcgtggacaacgcctccatcgtcccccagattacgggctaccttcaaacgcagaattacgccaatggcgctattgtgaagaagggggaagttctcttccgcattggcgattccacgttcagggaccaggtatccaaggccaaagccaccctggcccaggcacaggcccagctacagcagttgaattacgacgcggaaatttacaggcccctggctgcggagaatgccatttccaagcagaaatacgaggatacgcgcctgtccgcccttgccgcagaagcacaggtgcagcaggcggcggcggccctggccctggctgaaaaaaatctttcctatacggtgctgtacgcgccttttgacggaatagccggcatctccaggacaaacatcggcgacctggtcagcccggaaagcggcccgcttgccgtcgtctcctccgtcaatcccatccgcgtcaatttcgccgtcacccagcaggaatggattcagcaggcgggaaagaacgggaatgaaggcgtccagacgggcagcaagctggacattacgctgaaagacggcaccaaatacccggaacaggccacggtagttgccattgaccgggcgttcaatccccagacaggcaccatccgcgtacaggccaaccttcccaatgcggactatctgctgcgccccggcatgttcatcatcgccacggcccggctggccaccgtcaaaaacgcgctgaccgttccggcaaaatcccttctttcgacacaggggcgctttttcgtgattgttctggacgggagcaaccacccttccatcatccccgtacaggccgggacgcagcttggagaccggcagcaggttattcccctgaaaccggattccctcaccccccaaagcaaagtggtcgtggacggtcttctccaggcggaagcagcctccagaaatccggccgcccgcctgaaagcggtacccgccagcaatcaataagctcctcccgccatggctgatttcttcatcaagcgccccatcctttccatctgcctctccgtcatcattgtcctcctgggggccttttccattctgcgcctgcccatctccgagtacccggacatcattcccccctccatccaggtgacggccacttatcccggagcggactgtgaaacggtggtcaagtctatcgcatcccccatcgaacagcaaatgtccggcgtggacggcatgtcctacatgacttccgtcaacaccaacaacgggcaaatgagcatgatgatcctttttgaaatcggcacggaagccaacatggaccaggtgctttcctatctgcgctacgggcaggccacctcccagctgccgtcggaagtcagcgcgctgggagtctccctgcgcaagacaagcggtctgcccgccctagtcgtcagcctgtattcgccccaggggacttatgacggcctctggctggccaattacgcctatatcaatatggtggacgccatcaaacgcgtgcccggagtaggagacgtgcaggtgttcggggcaggccgctacgccatgcgcatctggctgaacccggaaaagatggccgctctgaatattacggccagggacgtgatgctggccgttcaggcccagaacgccgtgaatcctgcgggcaagataggcgcacagcccgctccgccggaccagcagctttccttcaccgtgaaagctccaggccgcctgaccagcgtgaaggaattcgaaaatatcgtggtacgcgggcaggacagttccatcgtaagagtgggagatatcgcccgcgtggaactgggctcggaaacctacagcctcagttcttccgtaaacggcatgcccgccgcttccatcggcatttacgaggcgcccggaggaaatgccatccagctggtggacaatatcaaagacctgctgaaggatacggatatgcctcccggcatggattacctcgtttccctggattccacgctggccgtccgcgccgggattgaagatatcgtcagcacgctggtgattgccctgggcctggtggtgctggtggttttcattttcctccagggctggcgcggtacgctgattccggcctttgccgttccggtgtctatcgtgggcgccttcatcgcctttccattattcggtttttccatcaataccatctgcctgatggggctggtgctggccatcggcctggtcgtggacgacgccattgtggtggtggaagcagtaaagaaccatatttccaatggagaaaagcccctccagaccaccattgcggccatgaaggaagtatccggccccatcgtcagcacggcactggtgatttcctgcgtctttatccccacgctgctgttgcccggcgtcacaggcaaactgttcgaacagttcgccgtgaccatcggcatgtccatcatcatttccgccttctgcgccctgtccctcagccccaccctgtccgccgggctgctgagaggggggaaagcggactccattcccctgctggggccctttttcaaattgttcaacaagggtttcaacaaggcgcgcgactggtacgtggaaatctgcgccaggcttatccggcacatgtggctgtccatcctgctgctggccgccatgaccgccctcctctttcccctggccaaactcattcccagcggattccttcccaatgaagaccaaggctacctgttcggcggcgtggaactgccggataatacatccctgaacgtcacggcagacaccgccgcgcggattgagaaaatcatcagggaggatccgggcgtggacgtagtgactaccgtcaacggcttcaacctcatcagctccgtccaaagctcatccaactccttcttcttcatttccctgaaaccgtggtccgaacggactgctccgggcatgacggcggacggcatcgccgcacgcctgaaaagcaggctgaacgcggaaatttcctccggcgtggcgtatgtggttccgccgccgcccctgcctggcgtaggaacgtccggggatgtcacattcctgctggaggaccgccagggcatcggggaaaaattcctggccgccaacacgtccaaattcatcgaggcagcggaaaaaaggccggaaatagcggacatcagtaatttcatgtctccctccaaccttcagtacaacctgaatgtaaacacggagcaggccactctccagaatatggacgtggatgaaatttacgccaccatccaggcatacatgggaagcaccttcctgaacaatttcaatatttacgggcaggaatggcaggtgtacatgcaggcggacgcaccgtaccgggacagcatcgacaagctttccatgttctatgtgcgcaacaatgaaggagacccggttcccctggattccgtaatcaacgttacgcacggctgggccccggaattcctgatccgccagaatatgttcaacagttcccagctcaacgtcaccccggctccgggctattcctccggccaggtcatgaacgccctggaagaagtttttgcccagaccatgccgtccggcatgggatacgactattccggaatgagctaccaggaaaaacaggcgcagaaaggtatcaccatcggcatgatctttgcggcatcagccgtgtttgtctttttgattctggcatccctgtatgagagctggtccctgcccgtagccgtcttcatgaccgcccccattgccatcctgggagcatttctggccctgtggataaccgggctggacctgaacatttattcggaaatcggcctcatcgtcctgattgctctggcggccaaaaatgccatcctcatcgtggaattcgccgtgctggaactccgtcagggcacggacctgctcacggccaccctggatgcggccagaatccgcctgcgccccatcctgatgaccagcatcgcctttatcatgggctgccttcctctggccgtagccacgggagcgggcgcagcggcgcggcaggtggtaggcgtcggggtcatcggcggcatgatgacagccgtcttcatcggggtatttttcattccttccttcttctacctgattgccaaacttgctaggctggacaaaaaagcggcgcggaaactccaggaaacggaacagggaactcccacccccgcgaagcaggccgaatgacacttccgaaacgggaaaacggctccctcacagcttcccattccccctacatccagaatatccaggcccagaaagccttcacgaaaacgagcaccacattaatcagcagccccaccttcaccatggtcatctgagggaattttcccgtcgcgaaggccagggcgttgggaggagtggaaacggggagcatgaaggcgcaggaagcgcctatgcctaccagaagcaccagcggcgtagcagacatgcccatggcggaggctaccgtgaccatcagcggggccaccagggccgcactggccgtattggaacagaattccgtcagcgacgtgatgaagaggctgatgatgagcaggatgacgatggggctctgccccatggcgagagaagatacctgatccgccaggaatcccgccgcccccgtctggacgagaatgctgctgagcgtgatgcctcccccgaacaggagcaggacgccccagtccgtatttttggcgatgccgctccagttgataaccccgcacagcggcagcagcaccgcagcactcagcgcgatgagcgtatccatggacggaatgccgcccaaagcagaggaaaggaaactgctgcacatccagctcccggccaccagcacgaagagaataaggacacgcacctgcctggcattcaaccttccctccgtttctcccccttccgccggcgtcatatccacatgcatccccagacgcggacggaagaaaagatacatcaggcagaaaacgatcactccgaacaccaggacaatgggcatggcaatccggaaccattccgcaaaccccatgccgagttcatgcgccgcaatggcattgggaggagaccccaccagcgtccccataccgccgatggaggcgctgtacgccacacccagaatagcaaaaggagccgtcgtcttaagtttttccgccggaatgcggtccagaaggccgatcaccagaggaagcatcatcgccgccgtggccgtattggacatccacatggaaagaaacgccgtagccaggaaaatcagaatcagagccatccccagactcccgcgggccattaggaggatttttcccgccagccaggtatcaattttctgttcgtggagagccccggccagggcaaagcccccgaaaaacaaaaaaatggtaggatccgcaaaaccggacagggccttcgcccccggcagaatccccatcaacatggcaagcaccggcaccagcagggaggttacggttacgtgcagggcttccgtcagccacaggatgccgataaaggtaagaacagcaagccccctggccacctccggttctacgggaagccacttgagcatagccaggaaaagaagcacgtcacacgcaatgatgatgtaattgcggtgccctttgggagtgtctgtagtacggtggcgcataaagcaaagataaacgacgctattttctttgtacgcatcagaaaaacagtgtcaatgcttttccataaaaatcccggaaaaggcctttcccggaaacagggaaacacggaccagcgcaccggcttgaggatacgcacggcgcacattaccggaaaagcagcgcctcttcctcctgcttctgaaaaattcgggaagcccatacacgcaaaaaaccgccatgcaatcgcacggcggcttgtaacaactgtttgactggcgcgcggaggggcggcctccgcccgggcaattattcggcggcgggttcagcggccttcttggcagccggctttttagcgggggccttcttggcggcggcagccttggtttcagtctttttggccggggccttggccgcagtcttcttggcgggagcttccttggcggcaggcttggcatccttggcaacgggaacggccagacggataggcgcattggaattcaacttggactgttccttcttacgcttgaggtattcaatacgtctgcggcgcttggtgactttgcggatttgctgtcccatagtgataattgctatgatatttactaattcttacgagctccatgtggcacatgggcgtggatacaactaccaaccccacctcccttacgcaagcacaaagcgttattaaggcacagaaaggcggaggcagtccccggttaccccaacccgcgcggaagaggaaaacaacttggatgaaggaggctttaccacaatttcagcgcatccacccggaccggctgttcccagcgcagatggttccggattgcggaagcgatgaattccaggccgcgctccaccgccgcaaccagtccatccccggcagccagccgtgccgcgacggcggcggacagggaacagcccgttccgtgagtactcacatcctgtacgcgcggacgctcccattgccccagcaggcagccgtccgggccggacagcacgtcccggcagtccccttccagatgcccgcccttcagaagaacggggcatccgtacctgacagcgaggcgcgcggcggcttccggcagttcatcccttcccggattaacggaagagcggagcaatacggcagcctcatccagattgggcgtaagcaatgccgcacccggcagcaaaagctcttcataaacagccaccgcttcttcccgcatcaggcggtcgcccgccgtggcgatcatgaccgggtccaccacgacgggaatatccgccccgtccagcaccccatgcaccgcacggacgatagccggggaatacagcatccccgtcttcacggcgcgcacgggaaaatgttccagattgatgcgcacctgatcggccaccagcgcagggtccacctcctgaatgccgcgcactgtccccggcgcctcggacacgacgcaggtgacggccgtaagcgcaaacgcccccatggcatgggccgctttcaggtcagcctggagcccggcccccgcggagcagtcggaaccggcaatcgtcatcattacgggaatactcatggccttgtttttaatcgggaaagaagcccttgaacatcccaaaatccgcatgtgccgcctcaatgtcacaaatccgggtgggaaaacaaggagggaatgccacaatcatcccatgacgcacgcctccccagccccggatgaacaggaattctggcttttcattcaggatgcccctctgccctccgccgaggaattgcagaagaacatgttccgcctggacggctgtttccggctgaacctttccggtgaaccggaaaacgctccggaccatgtgctggaaggagaatatctggatgaagagggagaatcccagctggacgtattctgggtcatggaaacggacgacgcgcgccaggctttcaaaaaggacggcgcggctctccggcagatagggaaccgcaccaaaatgctgcgcttcattctggaagacgaatatgccctgggccatgtattcgccatgattcacgccatactggaacaccgggacggcctgctggttattccggacacccggggaaacattattctggaacggaggaaagctttggattttctgaacagggaaattcgggaaagttaacgtttttgcgtttgcggcgcagggcttccctcgcgtcccgcattcagttgaagcgccttctttttccagacttccgccatatccgcatcctgaggggtcccttttcctgtgctgtagcagacggaaagcatcagcatggcgttgacgtggtcctgcccggcggccagccggagccagctgaacgccttgccctcatccacaggcacgccggaaccttccagacaggccagtcccacaatatactgggaatgggcgtctccggctgaagccgcctgttcataccacttcatggcacgctccatatcccgctccaccccctgcccctttgcataaatgttccccagatagacggacgaaggcgtattccccccgttggcggccttctccagcagcaccaggccggaagcggcatccttctcaaaccccatcttcccctccatgtaagcccggcccagcagccccatggctgccggatgttcctcatccgccgccttgtgccacagccccagcgccttattcaggtcctgatccgcgccatcccccttgaaatacatcattcccaacatgtacagggcgtttccccgctgggtccccgggcgggcaagcccgtactcaaaccactccctggccgctacggcatcacgcttgattcccgtcccatacaggaacatggcgccgatgaccgtttccccggaatacccggaaccggcctccgccacggaatcacaccaggcccgcacatccagcggatgaacccagccattctgcaatccctccgcatacagggcagccacatcattgagggctttcacatgctcgctaccattttccttctcgcggacggagccggcaacagcagcgtccagacgctctctccatgtctccgcctctttccgcaccgcagacggcttttcccgttctgcagaagaagcagcccgcttttccccggaagaaggagcgcggtcacatccgcacaaaaaaaagaaggcggaggaagccgcacataaagagacaacttttttcatcatggccattaccataagacagcctcatcaggctgccaagaagagaaatgatggaaacgccgcacccgcacgctatggaagagcgaaaccgaagagccggattccctctttttgcattgaatattttcctctttttgctctactgaaaccagttcaacctctgatgaaattcgttccgcccctgtatctcttgacatgcctgggcctggcgttcctgggaagtttttcctgccggggttccgcaacggaacttcccgtaaaatacatttttgagctgtcggatgaaccggtgaaagtgcaccctggcaaaatagataccaagagcgttttcttccccaaatacgcacgcggaacctctccggaaaccctgaagcggcaggcagccctcttccaatcccatactccccacgaggccaccaaaagcaaaccggccatcagcatccacatgaatgacgacaaaacggaaagggacgtccatgagcggtcaggctatgagtttcaccatgcggaaaaccaggaagaaattgtcatcacaaccgaaacgccggatgaggaaatctggctgaacgacggggatccggacagcccctttttccatacgccccgttccgccgccaatacggaaattcgtgaaatccccacgtcttccgattcctggcccgcctggaatgaagaggaagtcaacctgcacatgaatcttccggaatcggcgccgcgccccctggtagtgcagccggctccgtccggagccatccgcaccatcatcaaatcctttaacggaaccgtttttgaggcggatgcccagcccatgcatcccgtctgggatcagctcccgcccggatacgttcctatcccggctctcccggcctatcaacccaccttattgaagaaattacaataggagggggcaaaagcctcagaacttgaagcggacagccccgaaaacagaccatccattgaaagctttggccgttgccgaatccacatggctggtgacatactctacagccagcatcagcttgaccgcattgacggcctccggacacagatagcaattcagccccaggtaaaaggaatgcatgctgtccacccatgcgggataatgggtgacgctgggcacataacgggtattcagcttcacagaacggtttccaaaggaacactggtattgaaagacgccctcaaaatgcggggaaatccggtaaacgggctgcagaaccaggccgtacacattctttgcaccgggctggcctacaattcccacgcccgccagcaaattccccatgatggagaaagcgccgcggctggcgtcccagctcagggaaatcacgtcctgcgcgcccgttccgcagtaatcggacgaggaagggattttccttccccgccattccgtaaaattatgggcatactggtaccccagaaactggctgtcccacatgggagaagccaccttccacttcatggcgttcaggataaacaggttgtccgcagaatgaaactgaatttcatccttcaaatccgtaccgttcgcattcaggtaaatgccgtaggaatggtacaggctcttggcatccttctgaaaattggcctccagcccccagttggaaatgggaatcaattcattgcacagggcggatctttccactgttttaatccgggaagaagccaggcaatactccgacgtcaggtgaggcgtcagcttcccggccctgagcttgacgccgggcatggtcttttccagataaagttcatacagggaccactccgtatggctgccgatccattctccccgcacttcacggtgccggccttccaaatcccccacattcgtcagattggacagacgccaggaaccgtcccccatcaggatgtcgccgcccaggtaagcgcgcctccacccgttgttatggccgccggaagacgggcagaatttattggccccattggggctgacggctgctgcctgatactggccaatcagcgtcagcttcaccttcctgatccatgaggaatcattccggtacagcaccggaccgcgatccagcacacggcacagggacggcagagagcccccggaaaccggctgggactgaactgttcccgcgccagcttccgccgccggaaagacggcataccaacaagcggccaacaggaacattcccggaaaaacaagcttcatcataggctaaacaaacaaattgggcgcacatcttaaggagccctctccgaaaatcaagcccggatgctcctttcgacattgttgttttctgaaagggttgttacgaagaacggcaatgatggacgcaccagtgcgcccatccggaacgtctccatcagaaggccagggacgcaggtttcagcacggcttggagttacggctacatcggtctgttgtatctccggcctaatgaaccgggccatttcaatcacttcctgtacgatgaagaaacaacgatgcagcagcctggcatcatcgcgaacagttaccgacgccaaatcatcactccggcaagctttccctcccggcccgcatgggggaacatgcctgaataattatttcccgctcctgcggggaaaggccgtaaatgtcttccatcagctcattcatccgctcatccccttccgggcaatagcggaccgcgagagcgtccgccagcccttccacttcccgcagcaggggcagaccggggacccggatgggagcccggaggacaggagcggtatccatctggaaaaaatccccctgcatttttccccggcggagaaaccaaaactgcatcaggcgcgaattgaacagggccgccagatatttcatgctcacgcgttccgagcgtatcacgttgaatgccatcatcacataagcttccttttccgtataggagaaggttggacgggcacacttcctgacagccagaattttggggccgggccggaaaaaacgttcctgccggggccagtgcacatggtaatatttcatgcggcccatgcgtgtttcccgccgggcctccatcaggggacggaatttttccaaatggcgcaaaagcgtaacggcctgctccgctccgttggacggggtcagatataacagcaccttctccggagctttcagtgcatgccgccctgcctggacaggttcatacagaggtttgagaaaacgccgctcccgttccggcaacaggccaaaatacccctgaggcacgacaaataccccatcccccctccggattccgtaccgccgcactgcttccggcgccagattctccagagcgcgggaagaaacgacgtcaggattcggcacaatcccctgcgtcatttcctttgcggcatccagcctgaaattccggcatgcctccatcttttccagaagatgccgctctgctgcagaacaaaaggacaatccttccctgacgcacgctccggcatcttccggcaagggaaaccgacggtacggctcatgttccagaaatgattccacgtcattcacggagccgccaaaacggcggtattccggaaccaggcgtccgcctccctctccctttttctccgccagaacagtcatggtatggacgcgggcggattcaaacacgcggcaggctccgaaatccgacaggcgcagcaaaccgcaatcttccaacagcttgcgacggagagaggcggctcccgcattagacatccacttgttgggaacgaccagatgcattacgcccccccgcttcagggcatccagccccacacaggcaaacacgtaccagtaatccatgcgggaagagcaataggaagcaagagaagaacatttcaaacggtcaaataattccttgttccctttttctccgacaaaagggggattgccgatcaccaggtcaaagcctccttcctccatcaccgttgaaagaccctgacgccagacgccggacgcagacatatccagactgtccccgcgcaacaggcgatcccgtaaatccccctttcctccggcggccaaccatgcgcaacgaaaacggaaacgggccacctccaatgcctccgcgcaaacatccactccgtaaatattctcttccaaaacggcgcggattaaatcgggctccgggcaatccggttccagaagctttctgcgggcgacaagctcccggagcattcccatggtgaatgctccggccccgacggataaatccagcacacggatacttcccagcaacccggcttcttcatcaccgctcctgggagaaggcaatctggattccagccaggaagataccgcctcccgggccatccagcgaacaagaaaaccgggggtatacaccgtcccggaacggcgggcgtccgtcaggaaacgccccagcaatccttccagcacggaaggagtaacagcccggcaggcatcctcttccctcaaggaaaaagcgaattcccccggcagccggccctcatggcctgcctgccgtttctgcaagttgtccatcaaaacctctttcaatcgttcccaggtttcaggacagcccccgttgcccttctccacggagaaatactgagctataaaacaatcctgaacgttccgctccttcactgcggcattcgtacactactggaacaggccgcgcaaccaaaaggagaaattgtccagaaagccagcttcagaacatgaatgcccggaactcccttttctgaacattcccggcgccccaaaaccgtatcaaccaccgggaaggggtcattcgaacagattcacctatatgagcgcatattgaaaaactttaaccgcccgataaacatttgaaaaatatcccctattattattttccggcgcagcgctggatgaaaagtcaatcatggccatgatgaatcaatcgaaaagcgcttccggcagaaagggaatttcaagcatcgatgagacaggaggctaaggcaggaaattccccgccagcctccccatgctgacgttgtcaccttcttcaaattcagaagaatttcctcaattcgtctctctattcccttattttgcaataaataaaatccggctttgccatcagcaagccggactagaaaagaaatggtaccccgtcacgggctcgaaccgtggacaaactgattaagagtcagctgctctaccaactgagctaacgaggcacaggaatgatggcgttccttgcaggaacaaccggatggtaccccgtcacgggctcgaaccgtggacaaactgattaagagtcagctgctctaccaactgagctaacgaggcatgtatccggcgattcccccgcgacaagcaccacccatgaagatggagccactggtcggaattgaaccgacgacccacgcattacgaatgcgttgctctacccctgagctacagtggcatcgcgagaagcgcacgagcaagtaatcataagcaaccccttttagcaagtcttttttgcaataagaccgtttttttacgccttgaatgcggaataaaagccaagagcggcaggtgacagtagaagagcttgcataggcgggggaaacatggtggagtgcatgtcctcaaagagcttttctttccctacttatcatgaaggcatattacattttccagcaggcggacgaagaaacaatcagcaacattctggactggatgcgcaaccaggaacgcgccatttaccgcgctgccgtgcgtgaacttggagccctgaaaaaactgcgccccgaattcatccagcgcaaacctcttcaggaacaattttccttcatcaagaaaatgctgtcatggaaacccagcaatgaaatcggtgaccatctgcttcaggtctggctgttgcgcaaacaccaggacatgctgattacgttcctgaataccctgggcatcccccatgacggcaacggcattgtcaatgaactgccggaaacgctggacaaggagaaactcgccaaagctgtggacgaactgttcgaaaaataccctgccggcgtagcgtccgtctacctccagatgttccagctccagacggaagacggctgggaagaactggccgaggttctggcgaacgatccccgcgttaccatccgttgacgttattctcctccgggacataaacaagggccactccgttccggggatggccctttttatggaggcaaacggacgctcctgccgctgttattccagttccaggcggaacaagcgtccggacggcacgggatctgtttgaaacagctgcaatgggaagcatgccggaagcgcaagcccgtcaggagggaacgctgtccgactgttccggatggaatgaccacccctcatctccgtggtacaccatcatacgggacatgccgccgtcaatgaccagattctccgcattgacaaagctggagccgcatagaaagaaaacggccttcacgatatcttccggcaaaccgacgcgcccggaaggatgctgaaaagcatcttccggagacaggacgccgaacacccccgtgtcaatccagcctggactgatactgttcacacgaacgccgaaaggggaaaggctcatggcgagagcgtgagttaaagaagtgagggcgcccttggccgcactatagctttccgtatccttctgggacatggaagcgcgggtggaagcaatattcacaatggaagagccgcgggaaaaatggtcgcgaaataaaaggctcagcagatagggcgcggaaactcccacgcgcaaaacttcattgaattcctcgaaggaacagccggaaagaatgccgcgacgcgtgatgcacgcattatttaccagcacatccacacggccaaaacattccaacaccttttccgcaaaagaccgcacgtcctcttccacacccgcgttgcccgtcacgcaaagatgcccctctcccggcaattcccccagcagggaggccgttttctcatgcttcacatccaaaaccgccacccgggctcccgccgcagcgaaagcttccgcaatggcgcggccaatgccgcaggctcctcccgtcaccaccacggtactgccggaaaaatcaacatccttcataggctgattgtcatattccactcaagaaagtcaatcatcgccttccggcatacggtacttaacgtgcatacattacatcgcggtaaagccccatggctctggaaaggagaggagaacgggttaccacgtctgtttccacaataagacgggccatggaaccggaaacggccatttccgcttcctccgcacggcggctgatacgctccatatccctggttttcaccagattcatacgtccggatttttggaaatcatcaacaacatagcgcaaccttttcaacttggccaccacttccaccagctccatggcgcactggtcagccgttccggcatccttgatgctgcgcaggagaaagtcaattctctccaggcacatgcagaactcttccatggccacgacaggatcggcccagaactcctgaaaatcgattagcctgggttgctctattttgagcccctccactgccttttgcatggaaggggaatcatacatcctggccgtcgtgagcttcaggagcgcccggaaagcgcgtttgcgctcatcctccgccttctttctcatcttttccagcccatcatggaaatgccgttcaaaaccgggaatccagtctccatacttcttctccattctggcaatgttgttcatctgctccctgaccattcgtccctgaagggctacagatacggcataggcttccgccgcaactttattgtcaatcccctccagcatgtccaccatggtggaatactgttccagataagccttcagaaacggctttatcttgttgttcaaatacagggccacccgttcgtccgtcaggctgagaccgcacttttccagatcattcctgatgacatcggaatcataatacctgaattcatggagcttcagtattcccgacatcatccggtcgcgggccttgtccacgcgctcccggagaatggaatgaaaggcgggatgcatcttacgcgattcttcatgcacgcgcggattcagagccatcaggcgcccgcaattcatatcgtaaaatttaaacttctccgtcaggcgcccaagttcattcatcagggcctctcctgcggtacggtcctggatggaaacgaccagatccgtcatctgttccacttccttcaggcgcagggaaagcagctcttcataagattccaccggggaaagcctttctgacttccctgcttccgcagccccggcctcctttcccttatccccgcaggaacacaaacacagcgccagcaggagcgcgcctcccatcaacggcaaattcgggaacagagaaaaacaggagctaagcttcatgagaacgtagcgttgaggagggagaatgaaactccggcccgcatcgcggtaccggaactaccgtaaaaaagcgtcatcaaagttcaaggccttttcatttcatccgggaaaaacatttccgttcctttgacgggaaaaatattcatttaatataatgaacactcttctgaatcgggatgtcacactcttttatccatatcatcctgtctgccgtgattcttgatattcttcaatacggacatcctcttttgagagaggaatgcgggcccgtggttcatatcaacagggatatcctttccttcctggacgatatgcaggaaaccctggcccagggaggcataggcctggctgcgccgcaggtgggcaggcccatccagctggtcaccatcaacatcccttccacagacgcaaccactacctggctggaagtggacggatgcccaactacgttgtcccgaatcatgcccttgaattttatcaatcccatcctgcatcccttcggcaaaaaagtgccgtaccgggaagggtgcctgagcatcaccaaagtatatgcgaacgtgatgcgccgctcctgcgtaagggctgttttaaccatgatggacggacggactgtgaccgtgaaatgcaacggactgctggcgcgctgcctgcagcacgaggtagaccaccttcacggcggcctgtttacggatctggtttcccccggtgaccatgacaaggtgatacggaggctcagattgacccatccggacgcttttgaagaagatgacgacagctacgctcgccgcatgaaggaaaaacgccgcgcccaggcacggaaagcccggatgccgcagcctcccggaaaaacagcctgacgttcaggcaacaaacctatcccccctcttactgcccttccctaaaaaacgccccggtctccctccaggaaaccggggcatccataatcacatggaaagaaaaagagagaatcaaacaatccagtccagaacaaccttgccggattttcccgaattcatggcttcaaacccttcccggaattccgtgtagggcagacggtgcgtgatgatgggcgccacattcaagccactgcggatcatggaatccattttatgccaagtttcaaaaatttcacgtccataaatgcctttcatcttcaaccctttccaaatgaacttattccactcgatgctggaaccatcgggctgaatccccagcagggaaatgttggctccgttgcgggaattgtcgatgatgtccttcaggcaggacggagcgccgctcatttccaggcacacgtcaaatccctccgtcatttccagttccttcatcacgtcttccagcttttcacgggtcacgttcacggttcggtccgcccccagcgttttggcaagacccaggcggaaatcattgatgtccgtaataaccaccgtcttggctccggccttcttgcagacggcggcagccatgcagccgataaccccggctcccgtaatcaggacgtcctcgcccaccagatcccaggacaaagccgtatggacggcgttgcccagcgggtcaaaaatggaggcgatttccatcggaatgctcttgtggatgcgcaccacgttatcctgcggaatggaaaggtactccgcaaagcagccgggcctgttgactcccacaccctttgtgttgggacacaagtgcttctgccctgaacggcagctgcggcaatggccacagacaatatgcccctcaccggaaacaatctccccgggcttgtattccgtcacggaagaacctacggactcaatcacgccgcagaactcatggcccacatgcatccctaccggaatagtctgctgggcccatttatcccaattccaaatatgaagatccgtgccgcaaatggctgttttatgaattttgatcaggacgtcattcgggccgacttccggcataggaacatccatcaattccaaaccggggccagcctgcgtttttacaagagctttcatgccccccattcatgctctttttcccctgcgtcggcaagctcaaaattcatttcggagcgccgaaaaagcctagggaacggaggcttccgccaccccttcccttcccatggaaacgcccggagcagcggcgggcgacaaacgccggaaagacattcctgttcaatcgacaattcagacacacacgcaatttgccctttccaacgggaaggaatcatgataccaaggcgtgcgagttctccttttgaacactttactctatttacagaaccatggcgaaatcatttttacccaccattttcgagcacccgtatgaaatagaccccaaatatgggaaaagcgttgcgtacttctccatggaatacgccattgataattcatttaaaatctattccggcggtctgggctacctgtccggctcccatatgcgcagtgcgcatgatctgcgccagaacctcgtaggcgtcggcattctgtggagctacggctactacaaccagatccgtgcggaggacggatccatggccacgcaatacatgcgtaaaaactacccgttcctggaagatcacaacatcaaattcctcattcatgtctgcggagctcccgtctgggtaaaagcctacttcctgaatccggaaacattcggcactgcgcccatgttcttcctttccacggacctggaggaaaatgacgaggaaagccgcaatatctcccgccgcctgtacgacgccaacggcttcacccgcatcgcccagtacgtactgctgggcaaaggaggcgcccgcctttttgacgaactgggcattgaaccggaaatctaccatctaaacgaagcccacggcctggctgcggccttccacgtgcttgccaagacgggcagcgtggaagaagtgcgcaagcgtttcgttttcactacccataccccggaagaagccggcaacgaaaagatggacgtaaacaccatgaatacgttctccttcttcgacgggctctccatggaacaggtgcgcgccgccgtaggcatgacggacaatacgttcaactacacgctggccgccctgcgcctctcccacatcgccaacggcgtttccaaactccatggagaagtatcccgccagatgtggaaggactatgagggcatatgccccatcatccatatcacgaatgcccagaaccagaaatactggcaggatccggaactggcggaagctttccaggcccgcaacaaggaagcgttcatccgccgcaagcgggctctgaaaaaagccctcttccgcatggtgggtgaacaaacgggccgcgtctttgacccgaactgcctcaccatcgtatgggctcgccgttttgcggcctacaagcgtccggacctggtcaccggcaatcccacgatgttcgaacgcatgctccagcgcaccaactatccggtgcagttcatctgggccggcaaaccctacccgatggatcatggcgctattgaaatcttcaaccgcctgaatgacttgacggccaaatatccccgttccgccgtgctcaccggctatgaactgggcctgagccgctacctgaaaaacggctccgacgtatggctcaacaaccccgtggtaacccgggaagcatccggcacctccggcatgtccgccgccatgaacggctccatctccgtctccaccaatgacggctggatctgtgaattcgccaaggacggagaaaactgcttcgtcattccggaagcgcccgcccatctctccccggaagctcgcgaccgctccgaccgcgataacttctacaacattctggacgacaagattcttcccctctactacgatcacaacgacaagtggatggacatcgttttcaatgcgatgacagacatctatcccgaattcgactccgaccgcatggcggatcagtactacacggaaatgtacaacagctaagatacagccttgtccctcttacgcaacggccgcctttctttgggaaaggcggccgttctttttgaaaccggtgtcaaaaatccacaggaagcggttcaagcttacttgggtacttcctcctccccggcctcagccgccaccttgtctgcgtcccgcttatgacggtgcgcaaaaacattctcctgctgccatacgcgggaaaaagcagacgtgatcagccctgtggaaatagcaatgatggacacggcaataaacataatcaccccggtaaaaatacgccccatgggcgtaataggcaccaggtctccgtacccgaccgtactcaacgtttccacggcaaaccagagcgcgtcaaaaaaggaacggaatttctcgggctgggcatcgtgctctgcaatataaattcccagggaagtgacgtacagcatgaacaggatcacggagaaaaacagaaaaaactcatcccggatcaggtaaaaagcctttttaaaactggcggcggtttcattaaaccgggccaacttgaaaatagccagtatgcggacaatccgcagggaataaagaatctgccagtccgtcccgaaaaacatgcccaggaacggcacgcagacaataaaatccagaatacccatgccgctgaaaatataagccttccgcggtttggcgcacagcacccgcaggatatactcaaacatgaagaaatagctgatccagtaattcaccttggccgcgatacggcctaccagaggatgaatatccggaatggcattcaacgtgtacagcatgaaccataccagaatcagtaccctgacaatgttctcccagggaccgaaattggcagcgcccagcttggtgcgggtaatttggggcatggcgggaattaggaacgatgggcggccttccactcgtcagccttgaagccgacgcatatcttttcattggtaataaaaatggggcgtttaaccagcatgccgttggaagccagcagggctatctgctcatccaggctcatgccggcaagctgatctttcaatttcatgctcttgtaaagcaatccactggtattaaaaaacttcttggccggcaatccgctcccttcaatccagctccgcagttcctctgccgtgggattctgctccacaatatggcgatcctcataagaaattccctgctcatcaagccacttctttgctttctggcaggtcgtgcatttgggatattcaataaataatgaagacatatccgcacgctagccccgtaaacacaccgggtcaagcggccagcgcaaccatcccgacgtcatgacttgattggaaggctgccgatgtatccgccgttgaacacaaaacctgagaacgaaagcccggaatgcgtgcggataccgcagaaattctatattccggaacattaaagcaccatggcgcttcccaactgcgcgatggaaacgggattggcctgacgctcccgaagcgcccccgccagagcctgggtagccttctcctccccatgcaccagaatgatattcctcttgggccccccggtcctgtcaaaatactccagcagttctccatggtccgcatggccggaaaaggaatccatctcccgtattctggcccggacaggatattgtttacccaggatgggaacctctttccacccatccataatcttgcggccaagtgtatgttccgcacaatagcctacaaaaagaaccgtatttttcggatcgccgatgttattcgccaagtggtgaagaatgcgccctgcttcacacattcctgaggcggaaataataatagcctgcccgttcattttattcaaagcctgggactcgcccacggaacggatcaaacgcaactgttcaaaacaaaacggatccttctcccggaacaggaaatcataaacctccttattgaaacactccggatgaatgcggaaaatctccgtcgcacccactgccatgggactgtccacatatacgggcagcaagggcagagtgccttcatggtaggccctgttcagcagataaagcagctgctgggtgcgttccaccgcaaaagccggaatataaacgcggcctcctaattccagagcctccttgatagcccggcagaacgtctcgtcatcacgggagggggcctcatggaaacggccgccgtaagtgctctccatcagcaaaatatccacatccggaacagggacgggatcgcgcagtaattcgttatctccccgccccacatccccggaaaacaggaaacgcttcttccgcccgtcttccctgtcctcaatatccaggcacacttgcgcagcgcccagaatatggcccgcatcatagaacgtgagtgtcacccccggaacaacgggaatgggccggtcatacccgatattcacgaactggcgcatgcaccgctccgcatcctgttcggaataagtaggataaacatccggctgatgaataccgcggcgcttgttcatcttattgatgaatgcgcagtcgtgctcctgaatgcgggcggcgtccgccagcatgagctggcaaagatctctggttgcaaatgtactgtaaatatttccctgaaacccctgtttcactaaattgggaagattgccggaatgatcaatatgagcgtgggacagaactaccgcatccacctccgccggggaaaaatagggaaaatccttattgatatgccatgcctcctcacgccgcccctgatacatgccgcaatccagaagaatccggcacccgttcacctccagcaaatgctgggagcccgtcgtcgttcccgctgcgccgcaaaaatgaattttcattaatacatgtgtacaacaagccagcgggcaacgcaagaaatcaatacctgaagcctttcattcaatataccctttgaaagacgggaaacatcagccgcaaaatccatgccttttcttttttccaggccataaaaagagaaaaaccaataaactgcaccattcctccttctgtacagtattcctgtgaacatgaaattgcacttctttcccgcccgggttgcggtttccgtaaaaatgcatccgtcaaaaacttccccttcgcaaggcacatgctccatcacgaatgcacgccggaatacccgcatccaggagagccctccggtatcactgccaaaaataaaacctgcaggttattctgaaaacattccgttctgattgcaacccgcctcctgaaaaaagaggccggcaaaaagagtcccgcctaatcttaatgaagcctttcagctaaaatgaacaggacaggaaattcccgccctgttcataatgccgttcaattacaaaaaattacttgtcctccggtttggagtccgctgtcttctccacctccacgtcaatgggctgggaaagctcggaagaaggccggacctccgttttggaggcggaagcatcactcatggtctccttctcggtcttcagcagttcttcttcaaattcagatttggccttcttgaattctcccaggctcttgcccagtccgcgggcaaattccggaagtttctttgcgccgaacaaaaggaaaacaatcaccagaatggcgataatctccggtgttcccagtccaaaaatagctaacatgttcatcatggagtactacagtatttttaacagatttttttcatgccggatacctcataatacgcttcatgcgtcatcagaggcctcccgttcctgtttctgctgttccgcaagccttctggcggcaaaacgctgaaaacgccagacaataataaatattgccagcaaaaagatgcctgagccgccccacaacagccaaaaagcggcggaagccgccttttcatcccccatttctccagcctggttccaataataataggataaaaccggattccagggcagtgaactgtccggcagaagatggagacgcgccatgcggttcatggccggcaaataggcagcctgggcggatgctttcatcagggaatctccctgagcctcatcaccccgtgtataatatacctgggccagcatgtacatggccttgggatcccctgtagcatccgccacacgccgcagcagcctgtaggcctcatccgcatccagttccccgcccttcccgttctggagcagctccgcggcctttagtgccgcagggaaataaccggcggcggcagcctcacgatacagagccagggcccgggccgcctgttctgcggaaggagttccctccagcagcatatccgccagggcagccatgctgtacggatccttccattccgcccctttttcaaaccaatggaaggccttttcccggtcagggggcaaatacttgccgtcccggaacattatgcccagttccatcacggctcccaaatctttacgggaggccgctttctcaaaccattctacggccttggccgcatcctgcggcactcccagcccatcccggtacttaaatgccagaaggccttgtgctgtcaggttgccgctttccgctgcctgaagaagatatgggactgacttttccggagaactgtccggaaccagctttcgttcataaacaagggcagcccataacgccgccttggaatcaccgtcatccgcctctttcttccacgtctggagagattttttataataaagggctgccgttgcttcatccttcggtcctcctgctccctgggaagccattacagccacctggtactgtgccgcggcattaccgctgtcagcagcccgggtaaaccagtaccgggccctttccaggttctttgggtacaggcggctgcctgtataaaacagcttgcccaaatccagcatggaatccacatctccgttattggcccttttctctgccaaggaaacatactcggacatccatttggacgtttccgcagcattaccctccacgtcataatgcacagccagctcccgggcggcagctggatccccattcagagctctttcgcggagaccggacaagtaagcctcaaaatttccctccccggcaggctccggagaggaaatattctgagaagcaagaagtggatgctgaacgagggacagtccccacaatccggcaaaaagccaccatctgcaatgtttcttcataccggaacaagtcattcattaatggcccctgtttccgcgggaaaaactgctggaggacctgcctccaaagcccggcttacgaaacccgccttcacgcctctgaaaacctcctccgcggcggtctctctcaaaaccgccttcacggcgttggaaccctccttcacgacggttttccctgaaacctctctcctgatgctggaaacctccttcgcggcggtctctcccaaaaccgccttcacggcgttggaaccctccttcacgacggttttccctgaaacctctctcctgatgctgaaaacctccttcgcggcggtctctcccaaaaccgccttcacggcgttggaatcctccttcacgccggttttccctgaaacctccctcctgatgctgaaaacctccttcgcggcggtctcttccaaagccgccttcacggcgttggaaccctcctttacgtcgctcttctttgaaaccggcctcgcggcgcagggccccatccccgcggcggccgcggaagccatctccacgacgatgaaaatctccgcggcggtcacgggaacggaagccggaatctccccggaaatatccatcttccttgacttcacgttcatcctccgtctccacaaaacgagtcttcatttccggagtaggttcataagaatccccagcttcaaaatcttccggattaaacacataatcctcatcggaatcaacgcctcttccgccctgctcacccttggtgccccccccggcgacaagctgggaagcacccaggtatttacgctggcggggaggatttttcagtgacagagccacgtccgcatcatccaggaatttccagcccccgggttccaagtcccctccccacagggagccgatgcgcacgcgcaccaacttgcggacacgaaggcccaggcactggaacatttgacgcacctgacgcttcaacccctgttccaaaacaatgcaggcacggcgcgcagaagcgcggcaaacatatttggccttggcatttccctccggaatgcgtactccgcgcaaaaactgcatcagtacggaattatcaaaattctgatctaccgtcacccagtactccttttctatgccgccggtaggatgggaaagaacctgggtcaattcccccttattcgtcataatcagaagaccttcggaatcggcatccagccgtcccacataattcagatggcgcaggcgcggcggcagcaggtcgtaaacagtacctatggctccctgcgcttcgcggctgcacacatacccgcggggcttgttcaacagcaccacaacctcttccataggggtcatatggcggccgtccaccttcacgaaatccttctccgtcaccctcatcccaggcgtatcgataaccttcccgttcacttccacacgtccttccccaatcagcctgtcggccacccggcgggagtcaatgccgcaggaagccaggaatttattaatgcggatacctccgttttcttcggagccatgttgttcttcactcatattggtataatgtccgctatctcagcggatgattttgtattgtttatattacggcaattcacatcctcaaaaagaggaggctttcttttgccggaagaaaaaagcctctcggttcatagacatccgagaggcttcctgtattaggaaaatgacttgccgtgcaaactccgccgggaaactctccggagaggataaagacaagcttaagcttcatgcttggtcttcggcaggccgagagggctttggcccttcttccattcgccgcgttccttcagaagcttgacacgttcaaaacgcttcaggacggaacgcttgccgcctacggtaccggttgctttgaggctggaatgtttggacatgatcttgtgtttgtaaaaggttcagaaaaatactttacaccaccctttcagtggcaggcgggatcttataacggaaggttccgaacttggcaagagaaatttggcgcaatagccaaatatatcactctgtggcatcccccggatgcgattccagccacttcctccacaaatccggacggttcaggcgcgtacgctccagagacttcccgtgcttccatttttcaatggcggggtggttgccgcccagcaaaatctccggaacagccaggccccggaacacgttcggcttggtataggcgggagcctccagcaaaccgttggaaaaagattcctccacggaagaacgctcatcccccagcacgccgggaatcaggcgcgctacggcgtcaattaccaccacagaggcaatggccccgttcgtgagaatatagtccccgatggacaattccatatccaccagctcttctactacacgatggtccaccccctcataatgaccgcagaggataatgagatggcctccggaggcagccaattccgcggccaatgactggttgaacgtacggccctgaggagtcatcagcacaacgcgggtttcccgccggcgaagttcctctacggcggcaaagataggttccggcttcagcagcatgccctgcccccctccgcaaaggtaatcgtccgttttgcggtgcttgtccgtcgtccagtcacggatattatggcagcgtatctccaacaatcccctatcacgggcctttcccagaatgctgccgccaagaggggcttccaccatatccgggaacagggacaaaacgtcaatcgtcagtttggcggccataagaaaaaaacatcagcgttcgcgcttatggccgcgcagcatggcctcaatgaacggatccaggttgccgtccatcacgtcctgaatattgccggactctacgcctgtgcgcaaatctttcaccatttgataaggctggaaaacataggaacggatctggttgccccacccgatgtctcccttctcactgtactggcggtcggcttccgcctgctttttgtcttcctcaatctggtatagcttggcacgcagcatattcatagcctcttccttgttacgaagctggctgcgctcattctggcaggccacgatcacaccggaaggaatatgcgtgatacgcacggcggtttccaccttgttcacgttctggccgcccttgccgccggaacggtaggtatccaccttcaaatccttgtccaggatctcaatattgatggaatcagaaacttccggcgtcgcgtccagggaagcgaaagaagtatgtctcttcccggcggaatcaaagggagaaatgcgcaccagccggtggatgccgcgttcattcttcaaatatccgtaggcatactctccatccaccttcaatgtcacggaacgaatgccggcgtcatccccgtccgtactctccaaatacgtcacggaaaatccccggcgctcacaccagcggatatacatgcgcaataacatggatgcccagtcacaggcttccgtgccgccggctccggcgtggatggttacataacaggaagcctggtcctgcggtccgttcagcagggtcagcaattcaaaatccgccagagacttctgccatctggcaaactcttccacagcctcccggcccaggtcatcgtcatccgcctcctgagccagctcaatagcagcgtcaatatcctccagacgggacttcagcgcggaaaacgcctccatcctgtgtttcaggggattcacctccgccatcagcgcccgtgcggcattctggtcatcccagaaatccggggcgctcatgcgttcatccaattcggctactcgttgttgaatgccgtccaggtcaaagatagctcccgagctcggaaagacggctatgcaggacagccgtgtcgagcgccgagagatctgcagcgatatggggatccatgcgcgggaacctatcacgaattacctggacggaaaagggcaaaatgccgtttctccaagtcatcctcttttactccgactcgcaccgggccatttccgagaataataaaactccgcacgctgaacaaaaccgctcctcttccgcaggaagaacatctaacaggaaatgaatatttccgaaaccaagcccacttccccatttcaatgccccatgggaaaaacagcagacaaaaatcttatttcattcccttaccttacatcaccgttttctgcccttccccctctttccggaatgtggctcggccatccatatccccggcttcccataagagagcccggagccatgctacttggcggaattttcctctccaccctcaaaagggcggatccggcaggacctgagtttttcaatctcctcaaaagtcatgatgtgttctatctggcaagccacttcattggcgcgttcttccgggagggccaattcctcccgcaggaaatcaaacagaataccgtggctgacaataattttcccggcaattctgcggccttggggagtcagcttgacgggagcatactgcgtatactccaccagtcccatatccgccagttgcttgacggcagatgtaacggaaggcatctttaccttaagcatctctgcaatatccctcacctgggccgtcccgttcttttcagacagcaacccgatagcttccagataatcctcattgctcttggtcagctccaacatggtataaaatgaaagttaatactttagtggaaactaactcaagattttttccagacttctttggaatgagaaaaaaaccgccgcgaatatgaccattcgcggcggttaaattaatcagcgtaatacaaaaacgggcttacttctcttcagaagggctccactcttcgttttcacgggtagccagattgaaggcgtgttccagacccaccatatcgctgctcgggcggagggcttcaaaggaagcggtttcgcggcggagctgttcggtgtcgtaattgacggccttgatggaaaggccgatacggcgttcgatgctgtccactttgatcacgcgggcagtgatttcatcacccaccttgatcacatccttcacgcgttccacatggtcttcgctcaactgggagatatgaatcaggccatcaatatcgccgtccagattcacaaaggcgccgaagctggcaatcttggccacctggccagtcaccatatcgcccaccttgaagcggtcattgatggattcccacggatcggactcaagctgcttgataccaagggagacgcgctgatcctccttcttgatttccaaaacgatggcttccacttcgtcgcccttcttgagaacttcggagggatgattgatcttgcgggtccagctcatatcggacacgtggatcatgccgtcgatgccttcttccagtcccacaaaagcgccgtagggagtaaggttgcgaacctggcccttgatgacggtaccaatcgggaaacgggattcgatatccgcccagggattgtcttccaactggcggacaccgagggaaatcttctgttccttcacagaaatggaaagaaccacggcttcgatttcctggtccagcttcaatacatcgctcggacgggtgattctcttgacccaggacaattcggaaacgtgcaccaggccttccacgcccttttccaattccacaaaggcgccgtaaggcaggagcttggtcacgcggcccttgacatgggaattgatcgggtatttgcgttcgatatccgcccaggggttgtctgtcatctgcttcaggcccagggaaacgcgttccttttcgcgatccacttccagaatcacgacttccagggactgaccgatatggagcatttcgctcggatggttcacgcggccccagctcatatccgtgatatggagcaggccgtccatgccgcggaggtcgacaaaagcgccgaagtccgtgatattcttcacgataccttccaccttgtcgccttccttgacggtttcaaggaagcgctggcgctggtcggcgcgttcggcttcaatcacctcacggcgggaaaggacgatatttttacggtcgtcatttaccttgacgatcttgaattcgtaaacctttccaacatactcgttcaggtcgcgaggaggaataatatccacctgggaaccgggcaggaaagcttccacgccaacattgaccataagaccgcccttgacgacgctcttcactttacccttaaccaggccgccatcgcggtacacgcccacgatcttatcccagttctgcttatgggcggccttttccttggaaaggacgacgatgccttcgtcgttttcgaggcgttccaaaaggacttcaatttggtcccccacttcgatttcctcgtcttcaaactcggaaatggaaatagcgccttcggacttgtagccgatgtccaccaaaacgacttggggacggatttcttggatggttccggtaacaatggaaccttcacgcaattcgcggaacttgctgtcaataagttccgccagttcagttgtgctcatttaaatggttgatgagttagtattaacgatctttctcatggccccttattgaccggcgggcaatcggggcgccttcccccgccgggcgaaaaatcggttgctttcaatatcagtttcacacaagaactcaaggcttttcttgaaaaactcctcccgattttttacggaacctgtggagaccctctggacggcggcagaaaacgagcgcacaaaaaccttgtagcacttccgtcccatgttaaattccggctaatgggaaaatgcaggaatacctgcatctatcagccactcctgccgcaaaaccatgaaaaaaaacctcctttacctgctcgcagcggggctgtccggaacagccttccttcacgccgcggataccgtcaaactggaccagccggacctggaacggggagctccgatcatgaaagccctgtccgaccgtcaatccattcggagcttttctgaaaaagcgctatcccaaaaagatttatcagacctgctctgggcggccaatggcatcaaccgtcaggaatccggcaaacgtacagccccgtccgccatgaaccgccaggacgttaaaatttatatatgcactaaaaacgcctcctacctctatgaccacaaggcccacgccatgattcccgtaaacgatggggacgtgcgcccggcggatgcccccatatgtctcattcttgtaacggatacggcggaaccctgggctgccatggacgctggcattgtctcccagaacatctccctgttctgctccgggacgggactggctacctatccgcgcgccagcatgaacaaggatgccctggcaaaggccctgaaactaacctctccccaaacacccatgctctgtcatccggtaggatataaaaaataactacttccggctacattctccggacagtccggaaaagaaaccatcagaaatggaaataaattccacaacaggcggaattatggttccggcaaaatatccatgtagatgccgggagagctcccttcaataggcatcgcgcccacagcccgggcataaaaatcagccggaccaaccccgccgatgacaccgtatgcataccccagctcccgcaaacctttcagggcggaaaccaatagcacggtgcctaatccgcttctgcgcacctcttccgccactcccatggggcccaaaaaaccgcgagccgttacatcgtaacaggcaaaaccaagaatcttcttctcccgtgtggcaatataacaggaaatgggctggcggccaaacgcgactttcgcctcacttacccacttgggagaaaaattccggccaacccagtcagctaccaaatgacgttcgtaagcacccggacggcgaatcaaaaaaccttcccgctccagcctcctcaggtcttcttcaatatcgggcaaatcatacagccgcaccagcatatccatcataaccccggcaccgtatcacaactaagtgccgtggcgaataaaaaaaactggacaaacccatctttcaaccttagacttcgccgcaccacaaacaacgagctgtagcgcaggctggtagcgcgcttcgttcgggacgaagaggtcgcaggttcgaatcctgtcagctcgaccaatttccaagccgcctccgggcggctttttgattacttatttactgatataaaacaattttactcatcaataactctgcacttcccctattttgcgccaaggcaaataaacagcatcatgctgattgaatttaccctcctcacaggaacaaaatcaaacgggcaaatcttctcaattaagcctggaggatgtcgggggtatttaccgatgcagaggaaaaattatctatgcccaattctcacccctgtgccaggcagcatcacagccgctgcggaagtactctataacatccccctaaacaaaggagaatgaacctcctccacaaaaaagccccgttcatatttcatgaacggggatgagtcaaacgaagtcgaagcagggagataaaaccgggttacttgccggattccggtttgaaacgagctgcttccgattcggcggtgatttttgcaggctcgatatgcaggagctttttcatggcacggcccgggtcgctctccgtcatcggaaaatatctgacgtggtcgcctaggctgtaggaatccagtccataaatgttgtcagccggagtaaaatcttccggtgtgttcagcagtttttttacctcctttgaagacgcaaggacataactcagattacaactggaatacaattccgttttaggagcgcttcccttgggaagcttattggcgtgcccgttccacttgaccagagcttctacaggaatatctccccgcagcgactgaacgacgcgggcatagtgcgtcgttccctggtcagtggagactattttgtaaatgataacagacaggaccacatcgcttttttctaaatttcgggctgtacccctgagaaaactatcctgttctacttcggcctgcgtagcaacatgggaataacggtctggctctccaagggctacggttgaaagtaattctgaaaacagaacgcaaagaaaagaaacatacttcatatgtatatattagatactgattttttggtttatattcaataaaaatagggcaaacacaaaaaatgtccaccctatgaatatattatttaatatcagttattagtcatccagtgtcgatctttggagcagccacacggggccggaaataaaactgcccacgccaatgttatttcccgaacacattcccacatgcagactatcgccaaatacgataatgtctccagcctggggagtgttgtacccattttctccatcatccggataatcaggagcccccagcaggatacggagataaaccgccatttgagctgcgctgatgataacgtgctttttaccccccaacgcctgggaattaccctttgctccaatattattggctcccggagctccattaaggtcaataccataactactaagagcaatgctcagacgcaaggcgcaactgttaatgtaattggcatctcccgaaacgtggctatcgttcagccatcctccaatatagttccacacattatctgtagtcatggtgggataatccactacattatagcatcccagtagacgttgtgcattggcaatattccaaagattttttggagcatcgatttcccaaaattccagttcggaatctcccatcttgggaacaaactcctccgcattggggtaaggagcaatttcttccgggacggcaaggttctcatgatgcagtttcgcatagtggaagccctttttaagttccttgcttccagaaacggatgtggacgaatgtgagccagtcaattccgctaccttttcaccattgatttccagatagccgttgtcgtcaatctgaatcgtgaaattataggttccatcttccggaacgcggatatatccttcccagtcatgtccccggtttcttccgtcttgtgccatccaatcttgggggactctttcttcgttaccttgtagcggcggttgttttccacatccaacgggtggaacggttttgtagatatagccataatattatgtttcgtatcgtttactactgaatattcagttcatggaaaccttgaaagatttctcgctccttatcaacacgtttaacgtgtaatccaaccctcattcggaacgtgaaggaaaaggttaaaacggcacgacaatcaagtggaaaacaaaggatttgaaaagggcacaagaaacacaatcattgattatcaatagttacatttcaaattttcttcattcgggacgaagagaccgctggttcgaatcctgtcctttcgattattttctaacaacctcttccggacggttattttattttccggtaaaatcacttcccctgcaaaagccagtcagaaacccactagcagctgattcttctatctgaaaaaagcccctgctgggatactttatcagtcatccgtcaaattcccattgccccgcgcatgtttctttctctaaaatacaggtaatgagtgaatacttcctgaaacttcccggcgattcccagccgagagcctattccgaatacgaagtccgtgaatttctgggacagggcgtgatcgactcaaaaacgcttacctggaaacagggcatggaaggatggcagcccgtagcccaagttcttcctccgatgtcacctgtatgggaggaaacacaggatcaggagggcaaagatcagccagaagagcagcagtaccgcttgcgttatcctctaaacgggctagccaaattatccattttggcatgtttcgtattgctgcccttcatgctctggagcagctggattgttttttccaacaatgtcgtcaattatgaagaaattcagacactcatccagcagaatatggttcacatgccatcttttgcagtaccattggtcttcttcctcagcatcctgttcattccatccctgcttattcagctgatctggctgtaccgggcatctgccaatattcaggaatttcaagttcagggaattcggttcactccattccttagcgttcttctaagctgtatgccggtagtcggcatggtgctcaatgccctggttcttcaggaaatatataaggcatccaaaaacccggcagaatggatgttgcaaacaccctcccgttccctgcgcttatatcttctggtgactacggctctaactctgtgcacccttttccctttcggggcggaacattacgtgacggcctttctgctcaccggcgtactgatgacggcagccagcatcctgtggctggtctgtgtcctgcaaatcaccagaaaacaggaggaactggtctccaaaaatcaaaactcccgttcctgatcgaaaaaaccgtaatcagcgtttttccttttcttccgtgggcggctgactgtctgggaggattttatccaaagcttccatgctgttatccttatacagattctccagcagtttttcccaccccgccgccatctgaacctgtttcaaggcaataataggatcaggcatcatcatttccgggtcgggagcatattgctttagcacctcatccggattgattctgttaaacgttgtcttcccatagcccggcattcccgcctcatgagcgatggattcaatcatctcaaaatgcaaatgcgccaaataattgccgtgcgcagttccgactgagccgatttgctctccgcgtcccaccagagtccccagcggaatatcgctgacggttttcaaatgggcatacagactctgcacaaaacgcccgtccggcaagcggtgcagcagcacgacaacattgccccaatctggagaaggttctcctgcataaatcagcaatccgcggccggcggcccgcacgggcagtccctcatccgtgttttctcctcctattccatttaaatcctgtcctgcatgccttcccttacgggcggcattcatatcccccacaccctgggcaacataggtaaacgctccattctcatctccgaggggcgatgtaaacacatcggccagaggcgcctttgccagctcctggggcgtcaacaaaaccatccggtaatctacaggaaccggagcagaccgcggaatgtcttcgtcataaatattatggtgcatcccggcctccggaacggcggcatatttcgtcttgtaccaggcaaatgccgtaatcaagacacaggctgttcccaaaagccccataatgacgcgggatgtcgtcttatctatcatcgtgccgactctatacccacggaaccggatttacaatcacaagatagtcaggccagcgtctgcggaaatttttccatccacaatttgcgcgccgcacggatatcttctgaggaaacacggctggagagctcccatacgagcggaactccatgcgggaaaaaaggaagaaggcgttcaaagggaactactcctcccagcaggggaacctgatgatcccgcgcgggccatttgacgtcgttcacatgtcctccaatcaaatgggaggacattcggcgaagaaactgctcatgatttaatataagcaaattatgctttctttgaatatgcccgaaatcatgccagtaaccaataaagggattgtctccaaactccttcatcaacaaattcatttcatcctcactcggcacctgctcataatggctgcgcccttcaatgcccagcttgacgccaaattgtccggcttgcggaaggagctgccggagagcttcacgcgcccgttccagataaacgggagccaggcggttgcggcggcgtacaaattcgcccttggtgccggcaaacgattccgttcccaccattccctgacgcgccaggttttgcaaacgagccgtatccgtgcgtttcgccaagggttccaccgttcccatatgcaacacgatatatccggcccccagtgctgcgccctgttcaatagactttttcgtcaattcaatagccttggaacgcacctgcagcaaatccgccgtaaaaggcctgctgtctggagaatcccccacttcgtcaatcggagcgggaaaaaaattatgcaccccggccacctgcacctttccggcttttaccgccctcatgataccggggagaagggataacttgatgccgtgggaaagttccacatggtcaaaacccaaagaaagaatctcatcaatcatttcttctccgtcctgatgacggtgggaattccagcacgtagaaaataccagcataaaaaaatcaattgttatgagctgatggagccgggttccgtgtagcaatcttccatccactccttgacagcggcagtcatgcttccagcgacatccgcacgaggtttgacgaaagccggaataaaccacggaaatgcgcccaccagatcatgaatcaccacaacatcgccatcacatgtatgggagccggacccaatacccaacgtgggaatggaagaatgtacggtaacttgtcgggccgcatgaggcgttacgccctccacaaccacagcacaagcccccgcctctgccacagcctccacatcccttaccaaggcttcctcctccgcggaggatttccctttgatcttatatcctccctcctccagcactttctgcggcaggaggccgatatgacccactacgggaataccggcctccacaatagcacggatatttcctgcctgggctgcccccccttccagcttgacagcatccgctccagccaaaaacaatttctttgcggattgcacggcctgttccaccgtatcataagaatgtatgggcatatctcccactagcagggcgttcttcactccgcgcgcagtagcttccacatgatgaagcatatgatccagcgtcacatgagtggtatccggaaagcccaaaaccaccatccccaaggaatcccctaccagcacaatatctacgccggcctcatccaaaagacggcctgtaggatagtcataagcagtaaccagagtcacatgccgcctgttcttgcaggcgcggattcgttccgctttctcaaaagattgattcatggcgttcaataaacatgcaaatttaccagcgttccgataccaggagcggatcagcctcatccgtatccaattccgccaacaggcaggcaaccgttttatgctggcgcggcaggataagctccggcctgatatcggaaagaggttttaaaacaaatttcctcaaatgggctctgggatgggggagaatcagacgaggaggatcattgaccaccatgtcccccacatagataatatccacatccgccgtgcggggttcacagcgaatcccggaacgaatacgccccagaacccgttctataccctggcaatgcacaagcaattcctccaccgtacctggccaggtaaattccaccacggcattcaaataatcatccgcaccgtgcggacatccctgaggactggtggcatacagggaggattgcaaaaaagggtcatcagacaggctcatctgcaacaaatgatccctggcctgaaccatcaggctgtttttatccccaagattggaccccagtgcaatgcctgctctcttcatcagcaaaaaacatcgtggccgttccggaaaagaagaacggccacgatgccgaaaaagttataattgggacaaccccagaacgtcttccatggtatacagacccggttccctgccttggagccagagagccgcacgaactgctccggaggcaaatgtcatacggctggacgccttatgggtaagttccagccgttcaccatcggaagcaaatattacagtatggtcccccaccacatcccctccccgcagggaatgcatgcctatttccttggcgggtcgaggccctaccaacccttcacggccaaaaaccacactatcttcataattcctgtcaatggcgccggacaggatttccgccagtgtccgggcagtaccggaaggagcatcaattttgtgacggtgatgcatctccattacctctatatcgcagctgcctcccagaatctgagcagccttgcgcgtcagccagaacagggcgttcacccctacggaataattggaagcgaacacaatcggaatggatgccgcagcgtccacgatctcctggcgttccagctccgtatgccccgtagtgccaatcaccagaggtttgttattggcaacagcttccgccagcagagtgctggtgaaagcgtgatgggaaaaatcaatggctacgtcgcatttggcgagggctggataaagctcctgtccctgatcatgagtagaacccacgcaagtatccggattctgcgtcaccgcctcttgaatagcctggcccatgcggcccgaaatgcctgtaacaagaatggaaatcatatcactaaaatgttaaagaatattgaaacgctgaagaagagcggaaagctgagcttccttctcttccgccaatggaaccagcggaagacgtatgccgggctgtatatctcccctcatcgccaaagccgccttgatcggaacaggattggaatccagagtcattagccctttcatcaacggataaaatgtcttctggagggaaagcatttcccccatatcctgattcaggccagctttgacaatggaattcatgatgcccggaaccagattggatgttacggaaaccaatccgctggcgccacaggccataaaaggcaccgtcaggccgtcatcgccacacagaacagtgaaattttccggaaccacctgcatcagctggttcacgcggtccacattgccgccggcctctttcacacaaacaatatgcgggcaatccttcgccagacggctgattgtttccacactgatttcaataccgcaacgccccggaatgctgtacagcataatcggcagacgggtagcgtccgcaatagccttgaaatgggcataaactccatcctgagaaggtttattgtaataggggcacacctggagcgttccgtctactcccatcttttccgcttcctgggtcatatggatagcttctgcggtggaattagcgcccgttcccgcaataacctgaatacggccagccgcgatctccacggccaattctattaccctcaagtgttcttttacagtcaaggtgggggattctcccgtggtaccgacagccacaatgccggccactccggcagctatctgcgcttccacaagcattctaaaagcctcttcatcgacccggttgccggcaaacggagtcacaattgctgtataaagaccttgaaacttcataaccttacttggaaatatactatcttaacagacactttttgtcacgacagaatacagaaatatggcacgcctgtcaggcatcctgaaataccattcgtgaacaaatggagcaaaactccaggcaggaattaaacagggacaggaatgattccggccgcctgccgggccgccaggcagctttccttccattgaccacgatatattcccggtgaatatggcgaccttcgttcccacataaaaacaacgcagccgcacaggcggaagaagccaatcgagactgggaaacataccgaaataccggacggtgaattacgatctggctcattctgacatctctccggttcaggcaattttccaagcccgcgatatcttccacccatactcccttttttccagaacgggaaaccatattcacaatcatggccccagaaacaaaggcatgttccagcaaaacggacagacggacacgggaagaacaactcagtccctgcacctcgactgaggcatcttcacaaataatcaaataatcaacacgtccataaagagtatgtaccagaccagcaaaagaagccaaatcggaagaatggttcaggcggcctgacatgaccaggtggctgctgcccggaagacaatcaacgatatggcaagattcttcaccggcctcatgaagcatggcaaccacagttccctgacaggcaaatgccttggctgccaaatatcctatattgccggcgttgcccagaatgacgaccacaggtttctgaatgacttgggatttcatatgccgccattctgacgaaagagtgtaatccgtcaataccccacacatacttaagtcattaagaaagaaaaaggaatagttaagaaaaaattatatggtcacgacatcttacaagaaggaaactaactaagagaatgtagggggggggagaacgggaccgagcaagaaaagaacaggccccgcgagtcaagtgactggcggggcctgatggaaaaaaatcccggcggcgacctactcttgcgggacctgtcgtccgactaccattggcgcggcagcgtttcacttccgggttcggaacgggaccgggtgggaccactgcgctctggccaccgggcttcagggggaagaggtgattttttcttcatcctgcctgcccgggagccctgcttttttgggggcttctgagtgagggatttttttcagggtatgtgtgtggcggctaagaagatttccgtcctttgtgtggggagggattcagcgtaaactgacatctgcgtggctggtggttgatgaacatgcacaggtaaatgagacaagagcaagttgtcattcacgacggggagtgatgtaatatgatgaagtcaattggtaattagtatcgctcggctcaatacattgctgcacttacacctgcgacctatcaacgtggtggtcttccacgaacctgtagggaaaactcatcttgggaagggcttggcgcttagatgctttcagcgcttatcccgtccgcacttagctactcggccatgcacttgacagtacaaccgatgcaccagtggtgcgtcagacccggtcctctcgtactaaggtctgaacccctcaattttccaacgcccacagaggatagaggaccgaactgtctcgcgacgttctgaacccagctcgcgtgccgctttaaccggcgaacagccggacccttgggaccttctccagccccaggatgcgacgagccgacatcgaggtgccaaaccacgccgtcgatatgaactcttgggcgtgatcagcctgttatccctaaggtaccttttatccgttgagcgacggcaattccactttctaccgccggatcacttgggcctgctttcgcatctgctcgacttgttggtctcacagttaggcgggcttatgcccatgcactcgacacccggttgccaaccgggctgagcccaccttcgcgctcctccgttactctttgggaggataccgccccagtaaaactgaccggctgacacggtcctctggccggattcacggctcagggttagatcctccagtttcaaagggtggtgtctcattgatgactcggacgccccctaaagggcgtcttcagcgtctcccacttactctgagcattaaaaccgaagaaacaatgacagcttacagttaaggtctatagggtctttccgtccttctgcgggtaggcggcatcttcaccgccactacaatttcactgagcgcctggttgagacagtgcccaactcgtttcacgattcgtgcaggtcggaacttacccgacaaggaatttcgctaccttaggaccgttatagttacggccgacattcaccgggacttgggtttagagcttcgccttgcggctaaccccttgccttaatctttcggcattggtcacgtgtcacaccctatacttcgacttgcgtctttgcagagtgctgtgtttttgataaacagtcggttgggccatttctctgcggcctgcatcgctgcaggcaccccttcttccgaagttacggggctaatttgccgagttccttaaccaggtttcactcttacgccttggtatattctacccacccacctgtgtcggtttgcggtacgggtcgcttagcatacgctggggcttttcttggcactcgatccaatgatgcgctgagtccgtggactcaactcggaattcaataacctagtcatcttttctcatgcgtccccccagtttaagggttgcgagctcaggattattaacctgatgtccatcgcctacgcctctcggcctcggcttaggtcccggctaacccagggacgaaacacgttgccctggaaacctcgggtttacggcggccggggatttcacccggcttaacgttactcatgtctgcatactcacttgcatgtgctccagggtcagtcgccatcgcccttcgacgcgcatgcaacgctcttctaccactctgccttgcggcaaagtccagagcttcggtataacgcttgatcgccaatcattttcggcgcaggatcactcgatgagtaagctattacgcattttttaaatggtggctgcttctaagccaacatcctcactgtctgtgtaatcccacatcctttccactgagcgttatttaggcaccttagctgctgatctgggttgtttccctctcgacaatgaagcttatcccccactgtctcactgccacgttccattgcacggtattcggagtttgataaggtttggtaagcgggtgtgccccctagccttgtcagtgctctacccccgcgcatcagcacgtgacgctgcacctaaatgcatttcgaagagaaccagctatcacggggtttgattagcctttcactcctaccctcagctcatcagagaacttttcaacgttcacctgttcggtcctccacatggttttacccatgcttcaacctggccaagggtaggtcacctccgcttcgggtccagtacctgcgacttattgcgccctgttcggacttgctttcgctgcgactccgggccggaagcccttagtcttgccacaaacactgactcgcagactcattaaacaaaaggcacgccatcgcagattgctctgctctgacactttgtagacatacggtttcaggttctatttcactccgctcacagcggttcttttcacctttccctcgcggtacttgttcactatcggtcgccaactagtatttagccttgcgcggtggtccgcgcgggttcatacatcgttccacgtgtgatgtattactcaggataccactaattcccactctggatttcgtctacagggctttcaccttctccggccagcctttccaggctgttctactatccagtatggtcgaatatgacgtggtcctacaaccccgaaggaataccttcggtttgggctccatccgctttcgctcgccactacttacggaatcgatttctctttcttttcctccgcttactgagatgtttcacttcagcgggtttcgcgtttcataccctatgtattcaggtatgaacgatcgagtattgcctcgatcaggttaccccattcggatatccccggatcatcgcttgcttgcagcttcccgaggcttttcgcagcttgccgcgtccttcttcgcctgttggcaccaaggcattcaccgtacgcccttacttacttcatcatattgcaaaagctgttaccacttccacaataccacaaagccctttcgtgacttactgtattgtctcattgcttggtatgcatgtttatcttgtgttttgtagttgttgttcaactacccactttgttggaaagcgattgcttctcagcaatcgttttctttgccacgcagatgtcaattttcgctttccctcaataatcgattttgttggtgggcctgacaggacttgaacctgtgaccccgcgcttatcaagcgcgtgctctaaccaactgagctacaggcccggctttgggtctctttcccgaaactggtggaggcacggggactcgaaccccggacatccagcttgcaaagctggcgctctaccaactgagctatacccccagttgcggttctcggtgaaaaaaggtcgtcacgcacgtcgtgccaggtttcgctccaggcgtctggctgtttacacatctttggttcgttgcgggccctcgcgggttccgctttctctcccctcgggaagagatccgacctgtgcacttccgtgcacttgctccatagaaaggaggtgatccagccgcaggttcccctacggctaccttgttacgacttcatcccagttaccagtctcaccttaggaccctgcctccttgcggttggcttcagatacttcgggtgcgaccggcttccatgatgtgacgggcggtgtgtacaagacccgggaacgtattcacggcgccgtagctgatgcgccattactagcgattccggcttcgtgtaggcgggttgcagcctacagtccgaactgggcccagtttttaggatttcctccgcctcgcggcttcggccccctctgtactgggcattgtagtacgtgtgcagccctgggcataagggccatactgacctgacgtcgtccccaccttcctcccagttgatctgggcagtctcgccagagtccccaccttcacgtgctggtaactggcaacaggggttgcgctcgttgctggacttaaccaaacatctcacgacacgagctgacgacggccatgcagcacctgtgtaacgcctccgaagagtcgcatgctttcacatgttgttcattacatgtcaagcccaggtaaggttcttcgcgttgcatcgaattaagccacatactccaccgcttgtgcgggtccccgtcaatttctttgagttttaatcttgcgaccgtactccccaggcggcacgcttaacgcgttagctccggcacgcagggggtcgattccccgcacaccaagcgtgcaccgtttactgccaggactacaggggtatctaatccctttcgctcccctggccttcgtgcctcagcgtcagttaatgtccaggaacccgccttcgccacgagtgttcctctcgatatctacgcatttcactgctacaccgagaattccggttccccctccattactctagtctcgcagtatcatgtgccgtccgcgggttgagcccgcgcctttcacacacgacttacgaaacagcctacgcacgctttacgcccagtgattccgaacaacgcttgagacctctgtattaccgcggctgctggcacagagttagccgtctcttcctcttgtggtactatctttttaatttgctcccacatgacaggggtttacaatccgaagaccttcattcccccacgcggcgtcgcaccatcagggtttcccccattgtgaatgattctcgactgctgccacccgtaggtgtctggaccgtgtctcagttccagtgtggccggacatcctctcagaccggctacccgtcatcgccttggtgagccgttacctcaccaactaactaataggccgcgagcccatccccaagcgcattgctgctttaatctttcgatactatgcggtattaatcccagtttcccagggctatcccgctctcgggggcaggttactcacgtgttactcacccgtgcgccactagagaattattagcaagctagcaattctctcgttcgacttgcatgtcttatccacgccgccagcgttcgttctgagccagaatcaaactctccatcaaattaatttttgaaattgctggaccaaatggaatcttgcgatttcatttgcgccatgcttcagccagctcttccttcaagttgtgtctcttgaaggcctcttcgctctgcctcgcacggcgcgcgtcacgaccttttttctttccccttgcttctaccaaaccacccctctcagagctaggtcgctccttcgggcttttacccctcaggcacctctcggcaccctcggaaaaccctcggcggtttcggtagtcattcccttgaaatcttcttatcgcaaccccttccgggggtttctccgggtggccggctccagccgcttccagcactcttccgagcccttcagccgccgggcttttcatcccgtcgccgtgttggcgtgccgagaaatctatcataccacacctttttgtcaatttttttcgtcctcttttttgcgatttgttgagatcaaaaacaaaacatatctgattatcaacgtattacatttttatttttttctaataaaaaagcctctttcaccacgaaagaggcctaaacgtttcagaagtcctaagtttctctctactttttgcctcctccactctttttcttcatgactgcgtattgatgaaccagaggcagttcccggagggcgtttgcagcatccttccttgcctggtcataatcttttttctccattgccatattcatcatcacttcatagcaggcggcattgtatccgccatcatccctcgtattagaatccctcataatctggagagcgcgccgagccgccttatagctgtatttacgcatttcctccgagccgttaaggattttcaggatataggaagcaagcgaatcttcccgggggaaacgctccaagacgtggtcaaagatatcaaccattttccgataatttttctccttccaagccttttccgcccgcacttccgccacagtagacgcaaaccatccgttatcggaaaactgccctgcattttcctcaatcaacttctggtattcatcaaatttcttttcccgcctcaattcaaaagatttttttatgacagcatacatggcctgctggcgggccttccgtttcgcatcttcttccgcaaacctgtttttgtcaaaagagtccaatctggcagtttccgccacccattcgggcatcttcttaatttctccagcccacagcaatgttccgtcacgaacgacgaccgcggcgggaaatgagtcaagtttgagcaaatcacaaaattcaatgaccgaacgatccgatggaataccgacaggataaggagtccatccttccggcccggataaatagtcccgcatctgtttttccgccgacggattgagccccaataccacggcttttactcccggatggtctaagagcccgtgttttttaagaacggcatcaagagctcttccaggagctgtttctccaagtatattattgtggcctctccagaagctgatgaatacggttttgccgacaggaagtcctgttagaccgggatgattgaaccattttaatttgctgaacaggggagtgtactgtttgtcttcctgcactactcccatttcctgcatcttcctcggaggttccggttttatttcagcaaccgcctgatttacaagattctgaaaggattccttattgcctgaaagctgctgcaacttcgtccaggctttgctgatggacgttaaggaaagcgccttttccatatcctgcaacgcttcttccatatttccctgccgttccctaagttccgccatcagtttccatggcaaggaagcttccttgttattccttctggagatttcaatacaacggttcagacatctttccaccagggcggcatccatttttccggcaggcacggattttccatttagaagcgttcccgccacatcaatctgtacacggtaattgtccggatactctttgcacaggtcatccagtacggcctgtgcttcctggaatttttccaattccgccaagactctgaatggaaccattttcagttgaatgatctgatcctgctgaaactgtcccgaatcctgaatttgccttaaaaaggcctgcgcttccccctttcctcccttccgggcaagctctcccgttctctcagaaacctggcggtagagcttccatgcacgggcgtttgcgccgggattatcccccggaagagatgctgcagaaaaatcaggcttcaacatggcccgcatcatttcttcagaaagttttccaggatgccctctccaaataagcttgccgtttttaacggcaaaagcatgggggatgccgttaacccccattggagacagccatttatccctggtttttttcccatccacatccacggccatggcataagtaaggggcgatggacggttttttaaaaattctttcagagattccggagatttcctgtccatgacgttaactccgataacctgcatatgaggattattattaaatgcctgatgcaattgttccatatggggcatagcagccaggcacgggccacaccaggtagcccaaaattcaaaaatgtacactttgtccttttcccattcctttaccggagttccctgtatccatacatccggcaaaccatccagagcaagtgatggaagggcatcctccgaagcaaccgttttgttttcctttttctcagaagaagctgcgtgcaatggcattccggcagacaccgcaaagatcatggaacaccctaaaaccaacagagaggaatttaacatggtaacacggtactatcgtaaccttctgcgtcaagccaatagaaaaagaaaaggaaagatagaagagccgttatcgtgttctttccaccagaataaaatgaaaaataatcccaaaaagaaaagatattaatcatggagtttttcatatggaataagaaaacaaacacgctcagcatccacacttttttgagtttcattggatttaggaaaaatgatttacctttttggatacacaaagacaatattattttctaaaatagaaaatatgccagaaatggcttgccagatttttctgaatgcgaaaaatgcgctcatggatgaaatgaagtccagtatcagaaagtttctcgctcttacgaaaatgacccgggacgaatttgccgacctttgcggcgtcagcaaaagtcaggtcgataaatggctttccactgttccaattccccgtgccagacaacgccttatcatcagaatcatgaaggaagagtacgccaaacaggcacgcctggctcaaacaaaaaatccgaacagcatccacgttcccgttactcctcaaaagtatgaaaagttcaggaatgaagctgaacgccatggcctgaccgttccggaatgggcgagtgaagcactggatgctctttccagcatcaaaagcagaagctgaaaagaggatccgatattccggatcgattccagagaaagagaaaatagtgttgttatcgcctcttccctatcttttctttcattacaaatctgcacaaattcatgtctgacgacgatatacgcattttggtgaaggagtggctacaaagccaaaaccgcaagtcctatcaattggcggaggagataggcatccggccgcaaactttttacgcacagatgagcgttcgtaaaatatcggccaataccaaaaaagcgctttcccgcatcattccaggcctggtttccgattcagatctgaatccaccttccaatacggaagaatgtgacccgaaaaaactcagaatcaaggaatggctccgggctcacggcaaaacacgccgatggcttgcggaacaatgccgcgtttccgtccgcaccgtacatacctggtttactgcacgcggtaacattcctgtcacccaatatctctttatcgataagctgatgagtgaaggcgagtcgtggaaagttcagcttcccaataccattcccgtgaattttccggaaacggaaatggaaattgttcacaaattccagaaactacatccggacatagatcttcctatgtacggcatgcataaaatcctggagttatgcgttaatgtactcactcaggatgaatattcaaagacgtctccatactcccgtattaccaataccggagagattcgccaccgccggataaaataagaattattcaaaagttcaaattttcttttccacgggagcatttctgaaaatgcactgtttgcatacccatgccggtatttttctaaaacatcgcaggttctccgccagcctggccttccgggccattcttcttaatctttcacggaaccctttcatttttttgttccttttatcacgacggccacagactatcctatctctcaacacagagaaaaaatcttcagccacattacatcatccctccagtttcaaaaatcaatcactattgattggaaaaacagtccgaaccatgcgtaatagtgcttctatgcagcctgttcaccagagttaaccatacttaccttgcctctccatttttaagaaagccggcttttggtgaaaaagctcttatcgcatgaaaaaccccgtattcttaaaaagaatacggggttaaaaaatggcacgtccaactggattcgaaccagtgacccactgcttagaaggcagttgctctatccaactgagctatggacgcatgatgcggcaaaagagtaacagagttcatctcaacttggcaagcccggatctttgaaaagcgcgctttaagcgccggagcagcggtcatgcgtaaaaggtatgtccaccagggtcgctccaaacttccgcaccagaggctcctgacaggaaaacatgcgttcccgttcctccggttccgtatctatatatccgtgcagatgcagaagaccatgcaccatgtaccggaaaagttctctgaaaacaggttctctgaattccgaagcctgccggatagcggtatcaaagctgacgatgatctctcctattccgtctccatgcggaaaagtaatgacatccgtcgccgtcggatcattcaaaaaacgggcatgcacatcccggatgacgtcatcggaaaccacgctgatttctacttcatccaattcggaaagtacggggacaggaccttcaggcaacgccaacacggacggaagacaactctccaaggctccaatcagggcatccgtaacggatgaactgagcctcccctcccccaaatgattgtagagttcaagattcggtttcattttcctccgcatccgctccgttcttcatctccgtttccgtggattttccctcttgaagggttccggcatcgggcaactccatgatttcaggaacggctttgccttcaccttcctttttcaccgctttctcttctttttccctgacggacacatcagagaaagcatttttctcaatttttgcctccggattgtgagaaggataggcaatgcggttgtggtggatgcttttcagcgtcttaatgaaactgttgcgaatctttttgagatctccgaaggtaaggccgcaatcgtccaaatggccgtccaccacccgttgcttcaaaagttcatccacccttttctgcatttcctcacaggaaattttacccatggagcgcgtggcgctttccacgatgtccgccaggctgacgattcccgtttccttgctctgcgggttgggccccttgtaacggaagttggattccaccacctccgggacgtcatccggagacgccaggccgctttccacgcggctcagaatctcatcacggtattgaagggctttccggtaaaagaagtaagccagtgacgtgccgtgatgctgctctataacgtccaccaaaggacgcggaaggttgttctccctggccaatgccaccccgtcctgaacgtggtcgatgatgatacgggcgctcatgctgggcgtcagctcatcatggggattggggccgtccatgatattttcaatgaaataaagggggttttgcatcttgccaatgtcatggtagtaggcctccacccggcattcaatgggattggccccaatggcttccgccgcagcttccgccagctgggcaaccatcaggcaatggtgaaaggttcccggagcttccatttgcagccttttcatgagagggcggttcatatccgccatttccagccaggaaatgggcgtaatgattttaaaagctccttctatgataggcaggacaccgctgatcagcacgctggtcagcatgcttacgccaaaagccacggccaggcaaaccagaactccagtaaggttgtagtcccatgcctggagattgatgacacccatgatgcaacacagcaccatgacaagcagccccacaaagaagcccgctcgcagcaactgagcacgattccgcaggttatgggtaagcaacacggtaagcatgccggagagagagctcagaatccagaattggacctgcttttccggagcatattgctccggcagaatgaaaaatccgccaagcatgcagatggaaatagtggcaaacatgcccagaagaggccccagcagcaccgtgacaaccaacggagccatcatatagggaaggtacaaaagttcattgcctatgtcggaagtaatgtcagccgttacatgccggatgagaccaaaaaacaggagctggaccagaaccgccccccacgtgacgacaaaggttttgtttttcctgcgcagggaaccggcgcataaccagtacataggcatcagcgccagcgtcacggaaaaaagcagaaaagcttccgacacatgatgccatatggattttccccagtggggactgtaactgcccatccattgaagcacgatgaaaaccagcacgcacaacccgacggataccgccaggctggaatccaaacggtcaccggctgaacgggacacggaggcagccccttccggggaggcactttcttttgccgctgcggcggcatgctttttcagaaaatgaaacatgataattatttggggtacacttcggcaacctccggaatagtgcccagccgggccatctcctcttctatgagggggttgacgccctgctgcaccatttccatggaaactctcagggcattgcgaatggctacaggggtagaactgccatgcgcaatgatggtcacgcccctgacgcccagaagagggcttccccctacggagtccgcagaaaggcgcgctttcatggcacggaatgctccggaggcgcaggcagctccaaccatacggaacgggtttgccttaagttcctctttcagccatttgctgaaagccttggcggtagcctcgcatgttttcaacaggacatttccggtaaaaccgtctgtcagagccacatctatttcatgttcaaaaagatcgtggccttccacatttcctacgaatttaaaagggagcgcaccgcgctcctccaaatgcttcaacagacaaaaagttcccttggtaaaatctgttcccttttcatcttcagagccattgctcataactcccaccttaggcatctgtttgccgtaaacagaacgcgccagaatgctggccataacggcataccctaccaaatgccggggcttggcatccggattggctccggtatcagtcacattgcagactccgaattcattcggaagctgggtcacaatgcccgcacgttccacaccatccagcaacctcagtttgacggtggcagccgctacagccgcccccgtattgcccgcgctgaccacggcatccgcatctccggacttgaccagatccacggaaatggacatggatgaattttttttctttctcaccgccagcaatccggattcattcatttccacaacttccgcagccggaacgatctccacgcgcgggccggaaagcccccagcggtcacaagagctgcgcaccgtttcttcccttcccacaagataaattttttcaatgagaggaaaatcctgcagggcccgcttcgccccgtccacgttaatatcgggcgcgttgtcgccgcccatcacatccagtgcaatcttcatattatctgttgaagaaatgtgttagcagaaaaaacagtccgcttcaagcaagttcagccgctttgcgaagcaaaagcggctggaaagtctatatgatagcgccgcaatacggcgataattttcaaggcaaatgcggcgcccgcggaacttacgcttccgctttcaccacaatttccttgccggaacgggtcgtgtacgtaccgcaattggggcaggcggtatggccgggggtgctgctgccgcaattctggcacttgcggagcttcggcgcgcgccatgcctgagcggcaaggcgggtacgctgcttcatcttggacgttctgcgcttaggtgctgccataattttagttggtaaaaaggtgattaatgatgatctcccagttcattgagggcgtcccacacgccgctattcctgatcggggcagaactgtttacacccgttcccccctctttgtccactccaaaatacggagttttcgccatacagtcgttttccatgcctccgtcagcacacttcgggtatgccggaaaatccagaactatttcttccctcaaggaatctgaaacatccacaacattctgtgaatcaatctggaaagaagccgcgaaatcacaaacttccaccacgtagtcaaagtagcccaggcaacgcacacagcggaatttaaagggggcggaaatattgcctcttacaaacaattcattttcaaatctctgcacatgcagatcaaaagcaagaggcccaatggaagtaacctcttcatcatcaatgccgaaaatttcagaatccagttcaccgctgtattttttccctgcctccggcaagttctccagttctaccagcaatcttttcatgagtatatcttacaggcatacttaatgcctgacaagcaggcagggcggcaccattcatggaaaatgacacatccgtccctctttcaggcaatgcccgaattcgctccggcctaaccgggaggccattccagcttgcggcctgccaacagatgcatgtgcaaatgggggacagcttccccggcgtcatgcccattgttgatgaccaggcgaaagccaccttcatccagatgaagagtccgggcaatccgcccaactgccagcatcatgtgtcccagaaggacggcatcttcctccccggcctcggaaaggcggggaatgggcttgcgcggaacaagcagcaaatgttccggtgcttgtggactaatgtcccggaagcaaacacacagctcatcctgatatacgatgtccgcggggatttccccagaacagattttttcaaataacgtagcggccataaaatcaaaaaggaatctgcaatgactttaacatgttttgcaaaccgtgggcaagttattccctgacggctgaagcgcgtcgcaggcgatccataatagcgcggcccaggccggattccggaacggattccgccacaatgacgtcaatagcttcattttcatccatctgtctcatcagggcaaacaggcgcacggcagcttctgccagccgcccgctgccgggactcatggctaccacttccgcccagtccccttcccgggcaagagcggacgttccttcataggaaagcaagccgtacctcaccccctccaccggggcaaaatttgcccccggttccagcagcagcataggtttgcgcggggcgtaatggctggtgagctgccccggcgcatccgccggagattcttccgaaacaggacggcaggaaggcttgcggcgcaccatcttgaccaggttgcgaaattgttcccgggtcaccggcccctcacgcagcaattccagagagggcttgcccttctcgtcaagcacaggacgcacaatcgtgctttccagcccctcggaacaggctccggcatccagaatcatttcaatactgccccccaattccttctgtacggcagaggcggaagtagggctgatatggccgaagcggttggcgctgggcgcagctataggacgccccagcgctttcgccaccccccgcatggcaggatgagcgcttacgcgaacggccaccgtaggaaggccgctggttacaatatccggaatgatatccgcctttggcaacaccaaggtcagcggccccggccagaatctggaggcaagcgtatgcaccagatctttcagcccctccggaacggcggtatatttttccacctcactcccatgatgcacatgaataatcagcggatcaaaagaaggccttcccttggcttcaaaaatccttgctaccgcttccgggttcaaggcatccgcccccagtccgtatacagtctccgtgggaatccctaccagagctcccgcacccagagcttccgccgcacgggcatacagtttgcggttgtctgacaggggatctacctcgaacaattcggtttgcatggctttatccttgcctgaagaagctcctgcgtcaagcaagacctccttcccctgaaaggagaaaacagacaaatgaataagagcacgtcctgcggcctcatacttcccctctctttttccaactgcctttacttcactccacccttacggacttccccgagtgaaagctggcgctggaaaaggccattccgctaaaaagttgttttctcacgccgccggattgagtacaatcaagccatgaatagggccgcatcaacatccttgccaaacatcatcctgatcgggctgatgggatgcggcaaaactaccatcggaaaggaactgcaccgggaaacgaaccttggttttacggatacggaccagttaatcgaacgccagacgggaatgcacattccgcagattttcaaaattcatggggaatcacattttcgagacctggaaaccggaatcctgcaacagcttcagacggccgccgcacaaagccgcattatttccacaggaggaggcatcattatcagaccggaaaaccggctgctactgaaaaaactggggttcgtcgtctggctccatacagacgtaaacatcctgtaccagcgtatttccagatgcaccaaccgccccctgctccaacaacccaatcccaaggccgtgctggaacatctcatgaatgaacggcatgatttttaccgggaaacggcgcacttgaccattgatacggccaatctccacatccatgaaatcgcattcggcattctggaatccgccagagtattccggttccgacggcaataataccgacccgtttttccgtgagcgggaaattttctctttctgattcatcctaacgcaagcgcttccggggaagccctttttcccgctccacgcacaagaaacaacaaaaggcgatccccattaaaggaacgccttcaggaaaatgataatgcaccggaaaaggcttaagccttacgggccttacggatcattgaattcaccgtttcagagggctgtgctccgttggcaagccatttgtcaaccttttccagattgatggtatagttgacgccttccttcatggggtcataggaacccacttgctcaatgtaacggccgtcacgacgcgcgcggctgtcgacaacgacgattttgtagtaaggacggtccttggaaccctgacggttgagtctgattgctactgccatatcaattataaataaaaggtgttaatggaaaacttgcgcgccttgccactcacatgcgtgcgcgtgcggctttccacagcgggtgcagatgtatgcgatataatggagtcattgtcaataccagagttatttttacgggaaaaaagcctctccttcatttctgcatcaggaaaaattttccaccgccatgcggccaaaagaatacagcatgctgaatccgaaccccgccagcacaagggacaatattccatccagtattccggcataccgtccgtaaaaggaacgaatgggctgccagcggaaaacaagagcccacaaaatccagcccgccgttcccgtcgccacgattaaaaaaccgataaaaagagcataggaaggatcatgatttttttccaacagcggagcggaaagagccacaaagaaaaacgtggccttgggattcatcaggttagtcaccagagcatcacggtaaatacaggaagccggggaaatatcgccgcacccggcaaggaaagcattcctccccctcggccatattttccatgccaaatacagcatccagcaagaagcggcgcaaaacagccccacccccaggaaactgtgaaaaacggatgctcctactgtacaagccagtgcagcatggacaactattccggtaccaatgcccaaagcagccatcactcctgcgccaaagccgtaagccagcgtgctccgggtaacaaaagcctggtcgggtcccggagacgcctgggaaagaagcagaatacctgcgaatataagttcttccttcatgaaacaaaaaaatccttatgccctgggatgcgcctgtctgtaaacttccgccattctggcacgcgtcacatgcgtgtaaatctgggtagtggataaggaagcatggcccagcagttcctggacggaacggagatccgccccggcctccagaatgtgcgtggcgaatgtatgcctgatcttatggggagaaatggtaaaaggaatggaagacagcttcacatatttgttcagcatcatctgcacggagcgagcgcttaaccgggttcctatacgggagacaaacaagggagaattcttcggcagacaggccatggaaacataagtttccagagcagccagagcaggagttcccacaggcaggatgcgctccttgcgccctttccccattaccttcacgccccggaaacggtggtccacactgccgacatccagccccaccagttcactcaggcgcatcccgcaggaataaaaaagttccaatatggcggcatcacggtagggaagccatgcgggagcattggcgggaacggccgtcttgtagggaagctccaacaattccaacatctggttgagtgtcaggaaaacgggaagcgttttcttctttctgggaagggaaacgcccgtcatcggattcgtctccagcccgtgcctccgcatcatgaaacggtaaaaactgcgcagggcggcaaacctcagccggatggaagacgtggcggcttcatccttcagctcctggaaaagccagtccctcatctggtccggcgtacaattctcccaccctgggaatgaatcagccgcccaggccctgaactggcgcaaggcgcgggcgtacacctccaccgtatgaggagaagcctgcttttccacctccagatattgaagaaagtcctgttccggttccagaggaatccccatcatgaagaataaattactccgaacctttatccttgtcatccccggcatccaccggcgactccttcagcagcacttcactaatattggcccggatgaacaaatcaatatcgtccggttcttccatggcatacaaagggctgtctttatggctgtccgccagagcctgctctctctccaccgggctgagcacaccgtcctggtccaaatcgtaaagctccatcatttccttcattttggcctggtacagagccgcggcatctttcatgacaacggcatgttcctccggatcaatgcggccgttcccgttggcatcataattctgcagcaacatgttacgagtcagcagaaacaatccgggagcaaccatgaagcgcttccgtcccaccgtgcgaatttccaccatgggcatttccaccccctctgccggagggggcggcggaggaatttccttcctctcggcgggagagtaaaacggaattccgtctctcttgtccggcccggcatccggcctgcgcaccccgcgccgcttctctacatgttcccggaaagccctgtactcttccggggaaagccttccgtccccatccttatcaaacttcctcaggaaggcttttctggcctccctccgcgcagagcgggcatcctccaccaaccgggccttgtcctgttcggacaaaattcccgtgcccgtgctgtcatagcggtccaaaaccatttggcggatgagcaaagtcacctgaaggcattccagtccgggcctgggggcagtttccattttcccgcggtcgccggaagccacggattgccctgccgcaaacgggaacagaccgaacgccagcgctgcggaacatgacaagataaacatgtggggcaatctcataaccacttttactaaccccgccggaaaaagacggtttcaaaaataaacatccgcccctgccggcgggcgacacgggcggatgcaggaaacgtacggaaagcggaaaaacttacttctccacttgaacgatcgcgttcttttccaattcaatcaccacgccttccgcaatcttgagagaaacggtgcgctcattcaccttctccacaaaaccgtgcagccctgcgtttgtaatcaccttgtccccgcgctgcagggctgcgatgcgcgcctgctgctccttctgcgccttcctctggggacggatcagcatcacccagaacaggacgatgataatcacaaacatgaacatggggctggcgagaatctgctgaaacatatttgcgggttcctgcccggcggcgcccgccgcatcctgagcctgtgctaacataaagatattcataaaatgtcgtttgctttataccgcgcgataaacgaatccttgaaggaaccgaacgtgccggcggctatggcctcgcgcgcctgggccatcagccggagatagaattccagattctgaaaagaaagcaatcttaaagcgagtatttcaccggctttaaacaaatgccgcacgtaagcgcgggaaaattgcgtgacatgcggatgtccctccgggtcaattgggcgggaatccgtcgcccagcgctgattcttgatatgcatggggccgtccggagtcagcgccacgccgtggcgagccaggcgggtaggcattacgcagtcaaacatatccacgccgcgggcaatcatttccagcaattgggggggggtgcccagccccatggcgtaccggggcttctcctccggcagccagggagcggaatgatcaatggcgcggagcatttcatcctccggctctcccacggaaacgccgccgatggcgtacccgtcaaaatccatggcggccagttcttccgcgcacttctttcttaaatccgcatacacggaaccctgcacaataccgaaatggtgctgacgcccttccccggaacgggggcgatgttcctgcacccacgccttgcagcggcgggcccaacgaagcgtgtaccccagggaggcttccgcgtacttcctgtcgcagggataaggggggcactcgtcaaacagcatggcgatatcactgcccaagtccgcctggatctccatggaccgctccgggctcagcatcatgtacgccccgtccaaatggttctggaaacgcaccccttcttccgtaattttacggagcttggcaagggaccagacctggaacccgccggaatccgtcaaaatagggcggttccaggaggaaaatttgtgtaatccgcccatttgcctaattaaagcggaaccggggcgcagggacaaatgataggtatttcccagaataatctcagctcccagcatctccaaatcctgcggatgcatggttttcacggaaccctgcgttcccaccggcatgaaaatgggggtgggaacccgtccatgcggcaactcaagcgaccccaggcgcgcagccgtggaggaatctttctgatgaagtataaaaggcatcggaatcagactttctgcaatttgataaagcgggcgcggtaaatcggctttcccatggcctcccattgaagctggaaatccgtacggggataaaaaaattcgtcctcatcccaactggcacggctaaacagaccgctgcgcgccacatggtccagcacccacagaaaatatccttcatgatccgtcttgaacaggaactccccgccatcggacagggaacggtgaagcacgggaagaaaatcctcctgcaccagccggttcttatgatgcctctccttgggccaaggatccggacataaataatgcagccgggaaatgcagccgggctgcatcatccattccagaaagtaacggctttccacgcgaaacaccttcacgttatccaacccgcggacggccgcccgggaacaaaccccccgtacgcggcccaaaagccgttctattcccagaaaacggcgctccggataatgggccgccatctgaagcaggaatcctccgtccccacaccccaaatcaacctcaaacggaccatccgcgccaaaaatatcagaaggcgccagcgccttgaaaaaatcgtctggaataaaggccggatttatcatgggaatcaacgtgcggataagatgcgttacaaaacggactctgtcaaaccagaagaccctctccccgcaagcatggcgggaagaggcccgaaaaaacggaaaaaataagccagaacggcccggaaccgtcagctccggcaataaaggcgattataaattttacggtcaaaacggtaatagcgcgcggcgcggtggggaaccccctcctccttctcatccagcggcacaatgtaggggcgggaagcgatctttttgtggaaattacgcacatccatgggcttgccgtgaatctcctcattcagccgccggagctgaagagccgtaaacttggcaggcagcatgtcataaatcagcgcaggctccttcttcacggaagaacgcactctctccagcgccaggtcaataatatcccggtgatcaaacgccagttccggcaaatcatctacaggaacccagcgggtcttgtggctttccatcagtttgcgcagcttggtggaaatcctgagcatggccatgtaggccaccgtcaccaggcgtcctatcttctggccggaaacagcctccacccatgccctgtcctccggattcttgatgcgcgatggcgcaccgaaggtatggaactgttccaaatggggggaagacatgccggtcatgtcaaacaaaacgcggcgggcagcggcatccagttcttcctcctcataaatcaaatcgccgggcaatttggaaatggcgccggtatggccgggttcaaattgcgtcttctcaaccagaaggactttcaaaccttcttcatcgaacccgatcaacacacaatccactgagagatgcggataaaatgcctgcctgctcattatgttatctattattgtagtaagttcccagaatcgcatcaacgctacgcaagcgaaccagccaagtcaaccaaaatcaaaatagaaacggcaatgaaaagccggcccgcttggcaccgggaaacatcacgccacttccggaagactgcttctcacgggcggaaaaacgcgcccgcgtcttgcatttcatcatcaccccgtccatataataaaatcatgcagacaggtatcctcaggggaatgtccgtgctggccgggctgctatggctggcatcctgctcgtcctctcccaaaagccgggattatccgggctacatgacccgcccctataccatccgggggcatcgctaccatcccatgaacgtggaacaggcgctggcgtatgaacaaacgggaattgcctcccattacaatgaatgcgccctttgggggctcgtcagcggaaaaacggcgatcggagaaaacgtgcgcccctggcatctgcacgcagcgcatcccacccttcccctcccgtgcgaagtgctcgttcaatcccttcgaacaggcaaaaccgtaaaagtccgcgtaaacgaccggggccccttcatcaaaaacagaatcatagatcttagtgaagaagccgcagaacggctggacatgaagcaccatgggctggacaaagtcagaatcaccgtcctttccgtaggagacgggaaatggaaaaaagaagcgcccccttgcgccactccggcctgattccctacttcaacacattccgtgtggtcttaaaatgcatcttggccaccttgggcagcatttcttccccatgcagggccaccagctggcgcgcagctttcaccacttggccggaagctcccagcggcaacttcatgccggcgccctctcccgccgcatccatccagttcacaaaacgttcgcgcgccagaatagatgccgcagccacagcaacatcactctccgcccggacacgctgttccagccggacacacacctttttggcggcaagcgccctcttcagaacaaacggattggcgaactggtcgctcaatgccatgggacaatccggcaccttggccgccagcccctcaatcaccgtagcatgcccccaggcgagaaaacggttcaaattcccgaactccggataaagctggttataccgttccgggccaatgcttaccagatgaaaccggatacccggcaccctgcggatcccctccgccaggcaacggattctggatgaagaccctaccagcttgctgtcacaaacgcccagcttgcgcaatgcggcgccgatgcccccgtccacataaacgccggccaccaccagcgggccgaagtaatctccctttccgctctcgtcaatcccgaagtggggaacaaaaccgcatcctttttccatctcttccggctgggccaaaactccggtcacctgcggttccagcgtaaactctataaaatcatccgttccctttccctgcagaagaagcttgttcttcttctcgtaaaccgtcgccagcagggaaggcccggcaaatgaaaaacgcgcatagggaacctctcttctttcaaaccccttttcctcaagaatggactcaagccttccggcctgggcgtcagtcagcatggttgtaaacgtggttcgcatatatccttcccggagccggaacactccggggcaagcaatggaagcatcccaaccattccggtcaagcaaaattcccgcatcacgcggttgaggacgtaaaaatcaagcatgccacggattatgtgattttttaggagacaaatcatgcacgctgaactataaaactcatacattcatatcattctgcactccatatggctaaaacattaacaaaacgagacctcgttaacaaaatcagcgccgaaaccaacttcactcagattgaagtgttcgacatcgtacagcgtgccgtggacattatctccagcacccttgctgaaggcgaccgtgtggtgattcgcaatttcggaaccttccaggtgaaggaagtgaagcccaaagtaggccgcaaccccaaaaatcccgaccaggatgtgccgattccggcccgctccgttgtcaaattcaaggttggcaaggaattgaaggatcaggtcgccaagctgaccgcctccaagtaatccccacagggatcagacagattactccaggcgtctccatcaagcaatggaggcgcctttttgtttgcaatttgcgcggcattcgggaatataagggaacgtgagcatgttccggatacagcaccttcttctgatcaccgtagcagcactttgctcctgtgctacagaacgcacggtagctacaaactttcagccccggcaacgccctgattcggaaaaaacggacgcagagctgatggatgccctggaagcgaaattcgccggcggcttcggccagcagacggacaaggaaggaaacaccaggatggtgtcccaaaaacgaagttcctttgaagggctccggtacagcggcaacacgtctcaaatcgaaaaaaaggcgtttgaaaccgcatcctttgaaaaaaagaaatttgacggcgcctccacccggtttgaaacgaagaaatgggacggcatcaaatccttcacggatgataaactggaaacaccggacttcatcgcccgcgccaggggagtaaatacccactcctggcaggatgcctccaaacaatacgccacgcagcaatccgactttcatggacgctcctggaaagatgcggacaagcgcctcggccgcactgtcaaccgggacattgaagccaagagacaaagctttggacagccaactatcatgagtgcgcggcaggcccaggcgcatactattcaggaaacgcgggaaatgatgggacgcacagactgatgcgccgatgtttcggacgtgatcccatgccacatttcagattcgacattgttttcagccgccatctataattctgcccgtgagtgccaaagacgttcctccttccatcaccctgcctaccagcgactactataccattgtcaaaatgagcaatcatgccgtcgtgggagtattccgccagcatgtctttgcgcgccgcagcacgcgccgttatgcgccccccatccctgaagaacacgactcctattgcgttaaaagaactccggagcgtgtcatggtccaaatctttcatgacggcaacgaagtttaccgttgcatttttgtgccgcctgccgattattgacggcaggacaaccatgaaagctccttttttcagtccggccttctgcctcattacaagcctgattacagcctgctcttctccctccggccccaatgcgtggacgccggtcacttccggtcctccgcgtgcgcccatcccacagaacgaagttctggtcattgacgaataccccatgggggaatacaccaacgtggggcattttaacgggccggaagggcgcattgtccatgtctctatggaagacaaggaactaatcggctacttcaccagggaagctgcggccatggggggcaataccgtcgtcatcagggaaccgcgcatccgctaccgttccggcgaaggcaagagcagccgggtggacgtcatctatgttcgggaagaaatgggaacacacggtgcggaagacctgggcatggactcgctccccattgatgaagaatctctgcggatttattagagccgccggaaacgtcccaggtgccatttcctgcccggagttttttcagctctttttattggccgcaccgcaatgcgggcactccgcacgggaattccccttctccatataaaaccggaatccgcatatccggcactggaacttgcgcctccgatccaggaaagatcgtatccatcccacagccaggcaaacagacaccgcagcgcaaaaaccgccggcgcccagtaaaaacaggcgcatcaaaaaatcttggagggtcatattcacggctcttcctccttccattcgatggacatggtgccgctccgcggctcccgggacggaacccagcgcaaagaccgggcgaacctcattgcggactcatccgctccattacttccggaagactccagtaacaaaacttgagaaggaacgccccatacatccaccaccacaaaaaaatcactcctcagccccgtgtgatcttcacttctggaaaaaccggacagggagccggctgtaacaatccgtccatccagccccggggaacaaaaagacaaatagggaatgcatgttccggaaatctccaaggaaggattcatcatggcgcgtatatgaaaatccggatgctgccacatacgccagacctgatccgccacagtgggcacggacacgggggggagaggggccagaggcgtatctgcggaacgcggagaaggcaaagtcacacccatttccccggtcgggccggccgtcaccggatcagcccaaacggggcctctcacaggcagaggagtattgcgcagcacatactgatgcaggcgcggattatctgcaggcagcagcaccacggcacccggctgatctcccctgctgcggatttccggcacctccacatggacaaaaaggccggcggcaaaagcgcaaacgccaaaaaaaagcatccacagaaaaatacgccagcgcaacaggccggtttccctccagtcaaacgtcaatcccaaatgaaggtcgaaaattttatcccggctctttttattcagcttcatgaggtaacaagggaaaaaatcaatccgcgggctcggcggcaatataacacgtcatccccttggcaagcaccatatccaccagctgctgttccagggcccgtgaaacggaatcatccaaacgcagggcaatccccatacggctcccattctccccatgctcccgggaaatccggtccaattctgaggaaacgccgggcagcccgccttcaatcaggcggtttccgatataaaaagcgggctggtcgccagccgtaactgaaataaactcaacatcccccacaatattcatcagaaaatgggaagaaggagcctttacctcatacccgtacgccattcccacacgggaagtcatgatcgtcagcacgcagacaagaacaaccaaatccagcaggacgaccacctgaatgaaaaacgccccggcgggcaatgttgaacgggtcttgatctgcatgcctttcctccttccctgttgcactcacacgccccggccattcatgctctctccggcctcgcacctctgccgggcatcacacaccaggcaaacggcctccgtgccggcccgttccagggaatgtacaatctggcgggagcgggaggccaggtaggaataaaacaaataagcgggaatagcaatgctcagccccagggcggaactaagcagggcctggtaaacggcatccgacatggcaagagagggagccttcccttccagaacccccggctgggaataaaatcccaccagcccctggatcgtccccagcacgccgactagcgggctcaccgtagccactaccagcaatccgcggatattcttttcaatctgaaacacttccatctgaacggaatcctctgccacagtccgtagttcttcacgcctcaatccggcatgcgccagcacggaagaaaccacgcgggccgcaggtcccggtaaaatggaagcctcatgccgggcttcatccgtctttccggcatttaccagcttggaaatacctcttaaaaaatctccagtattaatttgaatcctgtgaaaatacaaaatccgctccgcgacaaccgccagcgcataaacggccagaacgctcaaaacccagaacaacggacctatcttgatgatcaattcattcataaccctctttctcgcgttagatcatgcacacttcccatgtaaattcaactcaaacctatgtggcccggcagccgagcttctgcagcagccgcgttcccgcccataataagacggaaccaagccacagcaaggaaccgaaactcaggagccataccgcatcaaacaggcacatgccggaaagcagcaccgtcacagccctttgaacccggggcctgcccgcctcacgccgtgctacggcggaaatcacgcaggtaaacaaaaacaggccgaaagcataccacagcaaggccggaggaggaacggactctccacccgaacgggcaaatgccaggccggcggccagcacccacaccccgcggcacaaccccatcaaaacaatggagccgctccacagtttatggaacacattatacagggaaatcacaatcagcagcaaagcccccacggcaaattccccgcccagcgccatgttcagcaccaggccggacaacccggccgccaaagacaacagcctcagtacggaaacgctcaccgcgccacacggcacggggcggtccggataacgggcggcatcccacctggcgtccacacggtcattctcccacatgccatacaaataaaagcacagccccatcagcactacgcccccatacagggcgagaggcggcagctccgccccacggacggaagcccacgccgccgccgcgttggtaaacagcgtgggaatattggccggacgggaggaacggagcactcctctcaataaacggcaatcatgcatcgccgcatactgtacagggaaaaacggcgatgaccaagcacatccacagtcagcaaaagtgcaggaaccggcatcccgcccatgccgggcagcatccatacatacccagaaatagattgtctttgcaggactgtcccctatcatgccggaggcattaaaaatactcttctctccccccatgaatatcaggacccacatccaggcgcttctcatctgtaccatgcccctgtccgcacaggggcaaagcatcgtggattcacgggcctcccttccacgggccgtccagcttcacggggatgaaggcagggaaacggtgcggccagacgaatccaagcgcatctctccgaacgaagctccggcatcccgtgttcagccccagcggatcgtcaaccggattgccgccacagtcaacggccgtcccatcacggccaatgaggtcagcgtgcgtctcatgcccatcggagcacagctcgcggcccagtatcccaaacaggggcccgaattctacaagcaactggccctggcgaaaaaaaacatcattgaagacctggtggagcgagaactgctccgcaatgaatttgaaggcatgggcggcgtcattagggactctctcattgaccaggaagtcaaccgcaccatcctgaccacctttaacggagatcgttccgccttcctgaaaaacctgagcctctccggcatgaccatccgcgctttccgggaaatgacgaaaaaacagcttcaggttcaaatcatgcgggcttccaaatacgaccaggaaataccgcctactccggaggaaatacagcaggaatacgaatctaccaaagaacaataccgggacctgaccaaagacaaaatcaaattcaagaaaatcttcattcccatgctgggggatgactccgcctccacgccggaagtacagctgaacctggcggaactcatcgccaaggaaatcaaatccaaaaacgccacctttgaggaaatggccaaacgctactccaaggatctatatgcggaaaaaggcggtgactggcccgttacggaacgctccacgctctccccggaatccgccgccatcatctttggcgcacagcccggcgaaatcatcggaccgttggtggactccaccggcttcaccatcgtattggtggagaaaaaggaactggcgccgccgccccccctctccgccatcaaggagcagattgacatcatggcgcgcaacaagcgcagcaatgaacgttataaaaaatgggtggaacgcctccggaaaaaagccatcgtcaaaatatacatctgattcttctcctttccccattgccggaccggcccattcaacaaggccggtccggcgttctctctttcatttcccctgtttttctttccgccaaccgttccgtccgctctccttctcctgccgggggcatcttcctctcgcccatatctctggaagacgccttcatacataactggacggcggccgcaagtcatcccgcctgacgcgtggaaccctgctgacgtaatccgggcagaaaccgtatcctgctgaataaaaatcttgcaagatggcagatttccagtcgtaatatcacagatatgttcaccaatattacacgcacgaccctctgcattactgcgttcagcatcgccagcctcatggcggcgcctctgaatgcaaccaaaacggagagcctggattggaactggaaattcgcccgtttcgggaaaatgccggatggcagtacgcaaccggaaccgggaaaagccatgggattcgccactgccaccagtgaagaatccggcaatccggcggacaatgccgtggacggggacaagtccacccgctggtgtgccgccagtggcaaaagcggagaaaaaatcaccgtggacatgggacgccccgtagatgtaaaaaccgttaacatcctgtgggaaaaacaaagcaaccatcttttcaagctggaaggctccggtgacggaaaacgctgggcaactattgaagacaaaacttccgggcaaaacgactccaaggaagacacggtagaaaacaaaaccggcaaaccgcgatacttccgcatcaccgtcacgggcaacaaccagagcaactgggccagcatccgtgaaatcacctttaaaaacgacaagggggaaattatccgccctcaggccgccgccggaaccagtaaggcggacaatccctccagcccctctttcaacgacaaaaactggcgttccttgaacctgccgcacgactggggcgtggaaggacccttccggatggaaattgaaaacagaaccggaaaactcccctgggtcggcattggctggtaccgcaaaacgctggaaatcccggcggacgccaagggcaaccaattctatctggactttgacggcgttatgtcccgccccaaaatttatgtgaacggacacctggccggcgaatggaaatacggttacagctccttccgcgtggacatcacgcccttcctgaaattcgggcagcaaaataccattgccgtcagagtggacaatccccccagcacctcccgatggtatccgggcggcggcatctaccgccatgtgtggctcacggaatccaaccctgtgcacatcgaacactggggcgttttcgtcaaaactccggaaatcaccaaatccgccgccaaggtagaagtggacaccacggtgaaaaacaccacggacaaagccgtcatccccactgttactgaagaaatcctggacggaggtaaaatcgtagcctccacaaccaccaaaggggaagaaattcccgccggggaaaagggcaaaatcaccagtacgctgacgctcaaaaaccccactctgtggacgctaaacgctccccatctgtataagatgaaaaccacggtcaggatgggagacaaagtcatcgaccaaaaattcaccaacttcggcgtaagaaccgttgaatggaaacccacgggattctaccttaacggggagcgcgtgcagctcaagggcgtttgccagcaccatgacctgggaccgctcggctccgccgcccacacgcgaggctatgaacgccagattgaaatcctgaaggaattcggcgtcaactccatccgcacgtcccacaacccgcctgcgccggaagtgctggacctgtgcgataaaatgggcatcctggtcattgacgaacttttcgacgtatggcaatgctccaaagaaggcgtcaacaacgaatcctttaacgaatggcatgaacgggacgtggttaacctctgccaccgggaccgaaaccacccctgtgtcattgcatggagttcgggaaatgaagttccggaacagggaatgaaaaatctgcaccatatctcccaaaccctgacggatcttttccaccgggaagaccccacgcgcaaagtgacttccggctgcaacaacgccaatgccgcacgcaacggctttggggacaccctggatgtttacggctataactacaagccctgggcctacaaggacttcgccaaggaccgcccccaccagccgttctatggtgcggaaaccgcctcctgtgtcagctcccgcggagaatacttcttccccgtggactggaacaaaggcaagggattctacctctaccaggtcagttcctatgacctgtacgcccccggctgggccaaccgtccggatgtggaattcgccgctcaggaagacaatcccaacagcgcgggagaatatgtatggacgggctttgactacattggggaacccaccccgtacaatctggacgccaccaacgccctgaacgtgccggaagggccggaacgcgaaaagctgatggcggaactcaaaaaactgggagaccgcgccccctcccgcagctcctacttcggcatcgtggacctgtgcggcttcaaaaaggaccgcttctacatctaccaggcccactggaggccggatctcaagatggcgcacatcctgccgcactggaactggccggaacgcaaggggcaggtaacgcccgtgcatgtctacaccagcggggatgaagcggaactcttcctgaatgggaaatcccagggcgtccgcaaaaagggcaccggggaaaaggaccgctaccgcctcgtgtgggaagacgttaaatacacgcccggcaccctcaaagtagtcgccaaaaaggacggtaaaatctgggctacggacacggtaaccactaccggaaaacctgcggcgctcaccctcaagccggaccgcaatgaaatcaagggagacggctatgacctgtcttatgtcaccgtagccgtccgcgacgcccagggccgtatggtgccccgaagcaaaaaccagctcaccttcaaggtaagcggccccgcggacatcgccggcatctgcaacggtgatcccacggacttcaccaccatggcgaatccggaaaacaagaaaatcatgaaaatcaaggccttcaatggtcttgcccaggtcattctgcgctcccgcaagggagaatccggaaaagtgacgctccaagtcatctccaacggactcaagccggctcagacaactgtgacggtcaaataaaaaaacaggaaaaactccgttccagccgccgggctccatcaggaacccggcggctttttcatcacattattccggggaaaaagagccatctttccaccctctcccggacaggtagggattgaaagaaaaaaactttatgctacccttttgcccatgtctgatctgcccaaagcatacgatccctccctggtggaagaaaaatggcaatcccgctggattgaagaaggttgtttcaaggctgacccggcttctgaaaagcctgcctactctgtcgtcatccctccccccaacgtcacgggagtgctgcatctgggccatgtactgaacaacaccatccaggacatcctggtgcgccgcgcgcgccaaaaaggatatgaagccctctggctgcccggaacagaccatgccggaatcgccacgcaggtaagggtggaaaaagacctcaaacagacaacgggccggagccgccacgatctgggccgtgaagccttcctggaaaaagtctgggaatggaaagaaaaacacggaggcatcatcatcaaccagctccataagctgggttgttcctgcgactgggaccgcgaacgcttcacgatggatgaggaatacaccaaagccgttggacaggtcttcattgaactctttaaggaaggactcatctaccggggccgccgcatggtcaactggtgccctgtatccctcacggccctctctgatgaagaagtcatcatgactgagcagaaaagcaagctctacaccgttctttacaaactggaagacgggtccggagccctccatgtagccaccacccgcccggaaaccatcatggcggacgtggctgtggccgtcaacccgaaggatccgcggtacgcccacctcatcgggaaaaacgtcatgcgcccgctcaatcccacccctattcctatcatcggagatgaatatgtagaaatagaattcggcacgggcgctctgaaaatcactccggcccatgataaggccgactttgaaataggccggaaattcaacctggaaattatcgacatccttacccccgacggtcatatcaactgcccggaagtgcccgaactccacggcatggaccgctttgacgcacgccgcaaatccgtggaaatgctggaagcctccggcctcatggtcaacattgaagactatgataacaaagtcgggttctccgaacgcgccaatgtcccgattgaaccgcgcctctccatgcagtggttcctcaaatacccctgcgtgaaagaagccgcggacgccgtagcgggaggggatatcacttttcgccccgcgcgctgggcgaaaacctacgcccactggctggaaaacattcaggactggtgcatctcccgacagctctggtggggccatcgcatcccggtctggtaccgcaaagacaaggcggaagaactcaggaacgccccggcgctggacgcctccgcactggaacagggcttcctctacgtgggaaccgaaccgccccaggacccggacaactggattcaggacaacgacgtaatggacacatggttctcctcctggctgtggcctttctccaccatggatgaggaaacccgcgccaaattctatcccactacggatcttgtcacgggaccggacatcatcttcttctgggtggcgcgcatgattatggccggataccgtttccagcatgacaaaccgttcagcaacgtctttttcacgtctatcatccgtgacaaaatcgggcgtaaaatgagcaaatccctgggcaactccccggatcctctggacctgatcgccaactacggagcggacggcctccgcttcggactcatgcgcatcgcccccacaggaacggacgtgcgctttgatgaaaaccagatcagcgaaggccgcaactttgccaacaagctgtacaatgccacgcgcttccggctgatgcagggagatgccaggggagaaacggcccctcactactcatccgtacatatctccattatctccaagctcaagcaactgcatgcagatgtagaaaaagcgctggcggactacgaattcaacgccctcatccaaaccctgtaccaattcttctggaacgaatactgcgaccgcttcctggaagccgtcaagggtgacctgaaggacggggcggacccagcggcacgggcagccacgctcaccacgatggacacggtgctcaggcactacctggcccttctgcatccggtcatgcctcatatcacggaagaactctgggcctccctgggctttgcggaaagcaacggcggcctgccgctcatgcgcactcctctcccctctgccgaaaacctcctggcaggacttgatgaaagccgcatcaccttggcgaatacccaggccgcagccctttatgaaacggccaacaaggcccgcaacctgaaagcggaatacgacctttccaacaataaaaacgtcagcttcatcctgaaaactccccacgacgtaccccaggatatcctctcccgtctggccattttggcgaacgccaaatccgtcatccgggacgcagcttactcctcccccaagggaacgcctgcggccctcacgccgcttggggaactcttcctgcccctggaaggccttattgacgtggaagcggaaaaggaacgcctgggcagggaactggacaaaatagctagggaaatcgccaaatccgcggccaagctgggtaatgcgggctttgtggaaagagctccggcagaagtcgtgaatcaggaaaaagcccgtctggcggactgggaggcaaaacaatcccagttaaaagggatgcttgattccctttcctaaccatctatcattccgggaatgaataatattcaaaagtactttgccggccgcgagcaattcattgaattgcttgaagcggtgggcatacgtactcttgaacaattcgcttccgcggacccctccaccgttttgcctgaacttcaccaggcaaaacggatgctgaaactgcagacggaaattccttccgctcccgttttcagggaatgggtgaatcaggctctttcctctcctactgcgccggaaccggagcttcttcccatccatgagggcgacggcctcccccttgctactcccgttgaccctccgattactgattcttcagaaaacagaagggaacgtgggcgttcccatacggacggacctccaaaacatctctccgccaaggccaggctgcaggaagaacacagctaccagcccgcaaaacatgttcacacccacaaggagccgaaaacctaccttcgcaaaaaaggcatcaagcacatgacctccttccggacatggatgggagccgttatcgtcctgctcctgttcatctgcatcctcttctccatttcggtcaccacccttgtgcttctcaatggagaacgaggctggccgttaatcagcctctgcttcggcccctggattctggcgctggttctctatctttccctggcgcttccccggaaatgcagcgtgtgcagggcccatgtcttttcctttaaaaaatacacccgcaataaggcggcccaccacattcccctgttcggctacgtattcgccacggcactgcatatattcctcttccgctggttccgttgcccggcctgcggttcctcccagcaactggggaaaccccgtaccgaaccgcacaggcattaacgaagcttaattcctgcgccaggcttcacggtatcccggcctcctgcctcctttcttccccttacctggcattcggaaggcggttcctccatctgtccgtcccttccattatctgcccctattccctgcacttcaaccccacgctctgacgggacaggaagcccctgcccgcttccgtatctcatggaacggttcccggcaacgaatccccccttcccggtaacttattctataaagagccaccattaggaaccgcctcaaaaccggatcggaaaaatccggcaagaaggccgtttctccgtctcttccggataaatacgtttcctccttcctccggatatcccagcaactcaaacatgcgttcaacgtcatggaaaagcatatccctgaaaacggcagtccaggaaaacaagcggacatttcaacaaccggaattcccccctcattaacctattccggatttgccggcctcgtgcgccaggcaagggctgcgctccggcaaccttctccctatatgggaagcacaccgtaatgaaaacttatcagaaaaacggggacaataaaaaacgccatcctccttttcggaggatggcgtccaaaatcctgaggcgtctcggttagagcacttccggagcaagggaaacaatcttcatgaacttcttttcacggagttcacgagcgaccggcccgaaaatacgggtgccgcgcgggttgttgtccttgtcgatgatgacgacggcattgccgtcaaaacgaagcacggaaccgtcatcacggcgaatcggggcggcagtgcgcactaccacggccttcaccacggttcctttcttcacggaagcggtgggaatggattcgcggatatggcaggtaataatatcgccaatgtgagcctgacgggtgcgcttgccgataacgccaatcatcttggcggagcgggcgccggtattgtcggctacctggactagggattccatctggatcatggtatcaaatctcctttacttaatggttgattcctgattaatgggtaagcacttccaccagttcccagcacttcagcttggaaagcgggcgggtttcaacgatacgtaccttatcgcctaccttggccgtggaattttcgtcatgggcatagaacttcttgctcttcttgacgatcttcttgaacttggggtgcggaacgcgggcaacgtattccacaacgatggtcttgtccatcttggtggaagtcaccacgccgacgcgcgtcttgcgaaggccgggcttcttggttgtttcggtttgttcggacattggattctaaaagtgttagaatattctgtaattaccggaaatcctcaattaaacctccccggtttcaccctgaatggtaagggcgcgggcaaggtccttgcggacggtgcgaattctctggttgttttccagctggccggtggcctgctggaggcggagattgaaaagttcttcacgaaggctgcgcaccagagcggaaagctccttggcggacatagcacgaagttctttggcggagttcttatcggacatggtgatgagtagctttagtgttgaacgccttgacgatagacgaagcgggttgatacgcccagcttgttggaagccagtcgaagggcttcacgcgcctgggattcggtcacgccgcctacttcaaacagaatgttgccggggcgaaccacggctacccagccttccacggcgcccttacccttacccatacgagtatccgggggacgggacgtaaaggatttctgcgggaaaatgcggatgaacaccttacctttacgtttcaggtaacggttgatcgcaatacggcaggcttcaatctggttgttggtgatccaaccgcggtcgagcacctgaaggccgaagtcaccaaaagcaacataggtaccgctggtggcattgccggaacggctgccgcggtgcatcttgcggtgcttcactctcttgggcattaaaggcatatcttattcctccttgtgttaagtgtgatgaacaaatgtggtagcggctttcttaggcgcgcggacgacggggtccgcgagggccggacggacgggaattctgctgggagacgacttcatcgcgcttgttgacccagcacttcacaccgatgatgccgtacagggtacgggcttcggcaaagccgtagtcaatcggagtgcggagcgtctgcaacggcaccttgccttcgcggtaccattcggcacgggcaatgtcagccccgccaagacggccggcgcagcggatgcggatgccgtcggccccgcgttccatggcaacctgcacggcgcgcttcatggcgcggcggaaggaaacgcggcgttccagttggacagccacgttttctgcaataagctgggcgtccgtttcaggggaacggatttccacaatgtcaatgttgacctgggtggaagcgccgcacaggccctggaggtactggcggatcttttcaatttcctcacccttgcggccaatgacaagccccggacgggcagtgtggacggtgatgcggacactgttccaggcgcgttcaatcacgatgctggaaacggcggcggacatcaactgttccttgatgtacttgcgcatcaccaagtcttcatgcagcttggtggcgtaatcctggcccgtggcgtaccacttggagcgccagtccttgttgacggcgaggcggaacccgattggatttactttctgacccatgatattagttcagctatatgtgtgttagattggtatggcctagccttcttgatcggccaggataacggtgatatgggatgtacgcttgcggatcatgttggcggatccgcgggcgcggggcatcgtgcggcgcatcgtgggcccttcatcgaccatgacggacttgaccaccagcgtatcaacggacagttccgcattattctcggcgttggccaacgcggacttgagcgtcttattcagcaggtaggcacctttcttgggggtgtaggacaggatgtcggtcgcctgggagacggacaagccttggatttcttgagcaacatcgcgcatcttcttggcggagatgcgggcgtatttgtaaacagctttcacttccatgggtttttcctcgtagtgcaggttattatgaagatgatttagtcgttggtttttactgaggcagaatctccgacgcgcaccggatcggctggcgtctcaagtttctgaacaagcgcgccacatacttccttgcggacgtccgtgactacggcttctccgatggtttgagctccccgggttaaccgaaccggcatcccgacttgcattcctgccgttctgccggtattcagcaccaccactccggattcggaatcaatgctgagcaccttggcttccgccagggttcccgcgccatctcgcacgggctgttgcctgtatcccagaacggattccagcaggcgcagagaactctccacagccgtcctggcgttcgcatcttcggatatggcttgtttcatgtaggcaaggatggctccggagagcttgacggatgcctgctccagccgctggacgcggtcattaaaagcttcgatgtccgccatcgcctgaatcaggcgttcctcgctgttacctagcgcagcgccccccaaagcttccagcctggaacggatgtccaccagctgtgcggccgccttgtcggcgtcgctgcgggcctggacataggatgccttgagggccgcattctgcttttcgaggcgctcgattctgcgcgtcagtgccgccgtatcctcttccgctccctgcaacgccccgcccagccctaccagggtggtaagagaatatgcaaggatggaagaagaattcgacatgttgattgttaacttactgattacttcttaccgataccgccgtgctgtttgaagacacgagtcggggcaaattcaccaagcttgtggcctaccatgttttccgtgacgtacacggtggcaaagttcttgccggcgtgcaccaggaaagtcaggccgacgaagtcaggcgtaatcatggatgcgcggctccaggtcttgatcggcttgcggtcgccggattcaagctgagcgtcgatcttggcgagaagcttttggctgacaaaagggccttttttgagagaacgtcccatgttatataatcctagttaaagttataatatattgattacttggcattgcggcgctgtacgatgacggagtcgctgggcttgcggagacggcgggtcttctggcccttgacgtggccccacggagatttgaggtgctggcgaccgccaccggacttggacttgccttcaccgccaccgttcgggtggtcgacggggttcatcgtcataccgcgcacggtaggacgaacgcccatccagcgggtacggccggccttgccggacatttcgttcatgtgctgggtattgcctacctggccgatcgtgcagtagcaatcttcattgaaacggcggatttcaccggaaggcatcttgatcagcgcgtaacccgcttcacggttggaaacgatggcctgctggccggcagcgcgggctaccttgccgccggaacccggacgaatttcaatgttgtgaacggaagtacccagaggaacgtttttcaagggcatggcattgcctaccttgggagcaaccttctggccgctttccaccttcatgcccacctgcagccccgtgggggccagaatgtaggatttttcaccatccttgtactcaatcagagcaatgcggcaggtacggttgggatcgtattcgatagtaaggacagtcgcgggcacgtcaaacttgttgcgtttgaagtccaccaggcgatatttgcgcttatggccaccgccaatgtggcgggtggtgatgcggccattgttattgcggccgccggatttcttgaggggtctgcagagactcttttccggggtagaggtggtgatttcgtcaaaggacggccacaccttgtaacggttagagggagtaactggcttgaatgacttgagggacatgatagctttccttcctaataggggctttaaacgaggtcaagggtttcaccgttggcaagcttgacgtaagcttttttccaatgagcggtgcgacctgcatcagagcggcgctgacgcttgagcttgccgtcatagttggcggtacgcacggatgcgaccttcttgccgaaagcaacttcgacagcctttttgatttcaattttgttggcgtcacgatcaacttcgaagaccagctcgccggtagtttcctggagcatggtggccttttcgctgatgcgcaccttcttgatgacttggtaaatgtctttcatggcttcttaagcagtacggctggcgagggtttctaaagcgttgtcaacgaggatcactgcatcagcattcatgagctgttcaatgttcacttccgcagcggtcatcaggagaacttcctgaacgttgcgggcggcacggtaggtggtttcgtcaaaggaagctgccacaacgagcaccttcttggcatccgtcaggtctttgacggctttgatgaaagatttggtcttgccgtcagccacggaaaattcggaaacggtgctgaccttggaagcggcaatcaggtcacccagtacgcggcgcagagccaagcgtcgggtgctcttgttcaccttcttgctgtagtcgcaggggcggggaccgaagaccacgccaccgcccacaaagatgggagcgcgcttatcgccgtgacgggcattaccggtgcccttctggcggaagatcttcttgttattgccgctgacttctgcgcgggtcttggaattggcggaaccggtgcggcggttcgcctggtaagccacgatcaggtcatgcacagcctgggagcccttgtcactgcctacaacctggatgttggcggcggcggcggcttctaatgtaaaggtatttgcggacatagataggttttcctataatcaatgtgaggttaactaaagccttacttcttcttggcggggcgaatcacgaggtaggaaccgcgcgcgccgggcacagcgccggagataaggatgacattatcttccggacgaacggcgacaaccttcaggttctgcaccgtgcgcttggcattgcccatctgtccgggcatcttctggttcttccagacgcggccgggggtggagcaaccgcctacgccgccggtacggcggtgcatcatggaaccgtgggcggcgggagagccgtggaagttgtggcggcgcatcgccccctggaaccctttgcctttggaagtgccgatcacatcaacccactgtccggcggaaaagagatccacaccgggatcttctgcgccttcagcaggcagttcggatgcttctacacggaattccttgaggagtttggtaggctggatgcccagtttcttgaagtggccggcctgaggcttggccacgcggctttccttctgcgcatcaaaagcaacctggatagcattgtagccatccttgtcttccgttttaatctgagcgaaggtgttgcccttgacgtcaatgacggtcacgggaaccatagcgccggattcctggtcaaacagacgggtcataccgaccttttttccgataagtcctagagccattgtagtgtgtctttctgttttttaattacttatccgggtgccaaactagatgcggatcgtgatgtccaccccggccggaagattaagcttcttgagctcatcaatcgtgcgcgcagtcgggtcgacgatgtcgagcagacgcttgtgggtgcggatttcaaactgttcagccgattttttgttgacgtgaacggaacggttcacagaaaacttttcaatacgggtcggcaacggaatcgggccgtgaactttggctccggtgcgcttggcggtttcaacgatctcctgggaggagcggtcgatggcgcggtagtcgaatgcgcggagtcgaatgcggatttttggactttgcatggacgtgcggtctattggttatacttcaaaggtttgtttatttagccttctcgctgacaatctggtcaacgaggttctggggcacctgttcaaagtgggagggttccatggaataggaagcacggccactggaaagggttcggatggcggtggaataaccgaacatttcggacaaggggaccatagctttcaaaatgcaggcgttggccttgttttccatgttgctgatctggccgcggcggcggttcaggtcgcccatgatgtcgccctgataatcggtcggcgtggaagcttcaacggacatgatgggttccagcatgatcggcttggctttcttgaaagcgtccttcatggcgaagatggcagccattttgaaagcattttcattggagtccacttcgtggtaggaaccgtccaccacttcaacgtgcacgtccaccaccggataaccggcgacgacgcccgtggtcatggcttcattaaggccggcataaacggcgttcatgtattccttgggaatggcgccgcctacgatcttgttttcaatggtaagccccttgccgcgttcgttcggcttcacatcgatgaccacatggccgtactggccgcggccaccggactgcttgaccagtttgccgtcgccatgggcaggggcagtaatggtttcgcggtaggcaatctggggcttgccgatatcggcttccaccttgaattcacgcatcaggcggtcaataatgatttccaggtgaagttcacccatgccggaaatcagggtctggccggtttcttcatcagtcttcacccggaaagtcgggtcttcttcagacagacggcccagggcattggacattttttcctggtcagccttggtcttgggctctaccgccatggaaataacggtttccgggaaggtggggggttccaggcagatatcattatccgggctggtgatggtgtcgcccgtggtcacgttgcgcagccccacgatggcggcaatgtcaccggagtacacggcatcaatatccgtatgctggtcagcctgaatctgaatgatgcggcccacgcgttccgtcttgcgggtgcggggattgtacacggtgtcacctttcttgagaacaccggagtacacgcggatgaacaccagcttgccgacgaatttgtcagcccagagcttgaacgccagcaccatgggcttggcatcgtccgtagcggtgatttcgaaggtcttttccggatccagcgtgctttccgcgtgggcgggaacggtttctaccggagaggggaggtaatccaccacggcgtcaagcaggaactggacgcctttgttcttgaaagcggagccaccggcaacaggcacaaatttgttggcgatggtagcgcggcggatagcttccttgagctctttgggcgtgaagggttcttccatgagcaccttttcagcaagctcatcgtccacgtcagccacacggctcacgagttcatggtaggccagttcggcttcttccttgagttcggcgggaatatcctcaatcgtgtaggtggagcccaggcgatcgttgtcggcgtaaatgacggccttctggttcaccacgtcaatctggccgcggagctggtcttcagcgccgatggggatcagaatggcagcggcattcgcgcccagcttattgtgaatatcgtccagcacgttgttgaagttggcgccggtacggtccatcttgttgacgaagcacatgcggggcacgctgtacttggtggcctgacgccacacggtttccgtctggggctgcacgcctgccacgccgcagaacaccacgatggcgccgtcaagcacgcggagggaacgttccacttcagcagtaaagtcaacgtgcccgggagtatcaataatgttcagctggaaattttcgccttcgaacactttgctgataccttcattcttcacctgcttccagttggtggtaacagcagcggaggtaatggtgataccgcgttcgcgttcctgctccatccagtcggtcgtggtggaaccatcgtgggtttcaccaatcttgtgaatcatgccggtgtagaaaaggatacgctcggacaacgtggttttgccggcgtcaatgtgagcggaaataccgatattgcggtaacgctcaaggggagccttgcgattgggattatttacgtgatcggacatagtgtctggaaagtatctgtagtgatcgaaagtgaatgattcggctgacagtcgcagaaggaattaccagcggaaatgggcaaaggcgcggttggcctgagccattttatgaacgtcgtcgcgcttgcgaacggaagaaccctgattgttggcagcttccttgatttcgttggcgagagccttgtgcatcggcacacccttgcggttgcgggcgtagttcacaatccagcgcatagccagggattcggaacgggccggatccacttcaagcggcacctggtaagtagcgccaccgacgcggcggctcttcacttccacacggggtttggcattttcaatggcgcgggtgattacttccagaggatcaatgctgtccgtgccttcattagccatgtcaatagcagcataaacaatacgttccgcaagggagcgcttgccatccagcataaccttgctgatcagtttgccaacaagagcgctgtcgtaacgggggtcacgacgttcgatttttctataaacgcgtttacggcgagccataatatatagtaggtaagatgtttggtttacttggcagcagccttcggacgcttggcgccatacttggaacggccctggcggcgcttgtcaacaccgaggcagtcaagagcgccgcggacgatatggtagcggacacccggcaagtctttcacacgaccgccgcgaacaagcacgatggagtgttcctgaaggttatgaccttcgccgccaatgtaggcgatcacttcttcaccattggtaagacggactttagccactttacgaagagccgagttcggctttttgggcgtacgggtcatcacctggagacaaacaccgcggcgttgcgggcagctatgaagagcgcgtgatttggacttctcttccggagtaatacgtcccttgcggacgagctgattaatggtcggcatgttttcctgctttggttgtggttcgtcggtctgatccgatattcaaggcgaacattcctttttataagcaggaagcgcgccttttttccggaggcaaacccgatagaaaacgtatttcttgtgcctttcggcacgtttggggacggccaatataacgtgattttatatcatgacaagtcttttattcatcttttcctgaatattttatccgttccattttccccgctcctttcaaaactccatttcgggctcccggagtcctttttcctccccgtccagcagttctccacttatggaggatgaaacaaaaaatcttcttcacaggcaaaaaaaacatttcttcatgtccgacatgttaccgcagaaaaaaatgcatgaagcgccggaaaggcacaaaaaacaagctttccatcagaattcacgaaaaattttttcataaaaacggcagctggtctattatttattgttaacctgcctgctttcccattttgccccgtccggaaagcatgacatagaaaaatccgtttccggaacgcatccggaaacggatttcatcaatgaactcagcagcccgctatttcccaggggtcaccagggaatgtccggacatttcggcaggctgtttcagccccatcaggctcagcagcgtgggagcgacatccgccagaatgccatcggagagagttacctgatccttgtcgtccgccacgtaaatgagatccacaaggttggtcgtgtgggctgtattcggagaaccatcctcattgcgcatgtgttcggcattgccatgatccgccgtaataagcagcttgccgccaagttccaacaccttcttcacacatttttccaaggcgctgtccactgcttcgcaggcggcgatgccggcttccacaaatccggtatggccaaccatgtccccattggcgaaattcatgattaccacatcatacttgtccacagcgtccacaaatttatccgccacttccgccgcgctcatctggggcttcaggtcataagtagccacttcccggggggaaggaacaaggatgcggtcttctccggggaactgggtctccacacctccgttaaagaagaaagtaacgtgggcgtacttttccgtttccgctatgcggagctgggttttcccggcttccgacacaatctgcccgaaaatattgttcagctgttcctgttcaaaaacaatgggagagggatacttggcatcgtattccgtcaacgtcacatagtgcactttgggcgttacttcacggtcaaatccgtcaaattcggggtaaaggaaagcgtcgctcatctgccgggcgcggtccgcacggaaattaaagaagaacaccacatcgttgtccctcacgcgctgttcgttgccataggcaaaaatgccgggcttcaggaactcatccgtctcccccttcgcataacactgctccacatattcggcaggggagcaggagcactgttcgccgcgccccagaacgatggcatcccatgccagcttgttgcggtcccagcgcttatcccggtccatcgcatagaaacggccgacaaccgtggcaattttggcgccgtacggcctgacggcttcctccagctggcgaataaagccgaccccactggttggcgagcagtcacgtccatccgtaatggcatggatgcaaatatcgcggacacccgcttcataagcatatttgacgatgccgatcaaatggttgatatggctgtgcacgccgccgtcactcaccaggccaagcaggtgcagacgggaagaagcggcctgggaaaaagcggtcttcagcacggcgttttcccccatggacccatctttgatggcattatccacccggcagaggtcctgaaagacaacgcggcccgcacccaggttcaagtgtcctacttcggaattacccatctggccgtccggaaggcccacgtcctccccggaagcgcccagcaggctgtggggatagttggcaaggaggtaatcagtaaagggggtatcagccagaacagtggcgtcaccgtactctttcgcgacatcaggccccaacggattgcggccccagccgtcgcgaataacaagaacgacaggctttttagaagacataggctttatttacaggcatcccctccttttgaaaagcctgaaatcaggcattccctctccgattccggaattgcctgaggtttgccgcccttccccacacggacgactacatatcttcccctcatcaccggacgctcggaatgaaatacagcaaatttccattccagagaactggttcccaccgttcccaggcttaattctatgctcagccaatctcccagccccgcagagctggagtaatccgcctccacatgcacgcggggccagccgcagtctggggaaaaaacctccaccccccgggaacgcaggtactcgtgctccacttcttccaccaaacaaagcagccgggagaaatgggccaccccggaagcatccgtatcatgaaaagctacctggcgcgttctgacaaagggcatgcagggaaaatcttcaggcatgccgtcatcctgcctcctcccccggaaccatgtccagccgcaaatgcgcgacaatatgtcacatcagcttgatttgtgacatgccgctctttatatataagagcaagccgcacggcaacggacccgccgccatgaaaaaagacaccattgacaagctgatcggccgcattgaccacatcaaggaggaggatctccagcgcttttttgtcaagctggcggaacagcagggttttttccagcaggtatttgaagccattcaggaaggcctgatcctgctggataacaagggaaaaattctgttcgtcaacaaggctgcccttaaactctttgacaaggaacgcgggcaaataaccccggatgacttctgtattttcctgggcagggactgctcatgggacacgatccagcagagccagaccgccgtctcccgggacacggaaatcttttacccggaacacagattcctgaacattttcatttcccccatcggcagcaaaaaccagggccacctggtcctgatacgggatgaaacgccccggcataaaaaaaacgcggaaaaccttgaggcagaacgcctgaatgccttgacgctgctggccgcaggagtggctcatgaaataggcaaccccctcaattccataggcctccatctccagctccttgccaggaaggcaaagcagctgcctccaaagtaccggacggacatggaggaattgctgaaaacagcggagagcgaaaccacgcggctggacgttatcctgaagcaattcctccaggccatccgccccaccaggcccatccgggaaccctacaacattgaaacaatcctcatggaagtgctgaaactgctggaaccggaaatccagcagcgcggcatccaaatcaacacggacctccagcccagtcttcccatcctcagcctggaccccgtccaaatcaaacaggtcttttacaacctgatcaagaatgcctaccagtccatccctccggagggaggcaccattctgctcaaaagcggttatacggatgacagcgtattcgtcactgtggcggataccggctgcggtatttcaccggaggtcatgggcagcatttatgaacctttcctgaccaccaagtccaccggctccggactggggctgcttatcgttcgccgcatcgtgaaggaacacggcgggtccatcacgctggccagccagccggggcagggaaccaccatcacggtcttcctgccgcgcgtggaacgcaccatcaggctcctgccatcctccattccctcatgaagatgcctgttctgctgattgtagatgatgaaaaacccacgcgcgacgctctgcgcatgggttttcaggatgattatgaagtgtacaccgccgccaatctctcccaggcttccgccctcctgcaggaagaatctccggacctggttctgacggatctgagactgggcggggaaagcggcatggacgtgctgaaagccgctgcctccctgccccaccctccgcaaagcatcatgatgactgcctacggctccgtggatgccgccgtagcagctatgaaagagggagcgtacgacttcgtcaccaaacctctgaatctggacgccgtggagctggtgctcaaacgggcgctccatacccggaacctggaaacggccaaccaggaactcaccacccgcatccaggcggactccggactgcaaaaactcctgggcagatccgccgccatggaacacgtattctccattattcgtcaggtggcccccagtaaaacgactgtgctgattgagggggaaagcggcaccgggaaagaactcgtagcccaggccatccattccctttccggaaggccggaaaataaattcgtggccgtcaactgtgcggccctttccccccaattattggaaagcgagttgttcggccatgaaaaaggctccttcaccggagccggacaacgccgcatcggccgctttgagcaagcggacggcggcaccatctttctggatgaaatcggggaaatagacgccggaacacaagtccggctgctgcgggtgctgtctgaacggaccattgaacgcgtagggtccaatgcatccattcccgtcaatgtgcgcgttatcgcggccaccaacaaatcattgaaaaagctcgtgcaggaaggaaaattccgggaagacctctacttccgcctcaatgtggtgcatatccagatgccccccctccgggaccgccgtgaagacatccccctgctcgccaccgcctttctgaaggaattcgccagggaaaacaacaaggaattcaagcccctttcccgggacgcccttgaagccgtccggaattaccagtggccgggaaacgttcgtgaactccgcacggccatggaacatggcgtcgtcatgagcaattccgccagcataggcctccatcatcttcccccgcaactgcaggatacttctccggaagccgctccacaggaacggccggaggacaatgcacccaacacgcagaatgggcttgtcccggccggggttttgaatttatccttgctggaacggaatgccatccaacaagcgctggcccagtcaaacggcaataaaacggcagcagcccacctgctgggcatcagccggcgcactcttcaacgcaaactacaagacatcctccattcatgaatgagccctcctcggcatcccgcaccccttttatcattatccttatcctgctgctggcaatcacgggggtgcagtactttttcaactttaacgggctgggcactgatgccgccatggaccacgcccaaatcgcccgcaacgtagccagggggcaggggatgaccaccaactggctgagacccatccagatggtctccggaagcacacgcgccggcctcaacccttttctttcagacgcccagatacacgaacaggaagccatccgggccggacaaggcgaaaccctcgtcgatccggaaaaattcaatccctatgccctccgggacacacgcaacgctccgctgaacatcctgacggaagcagctgtcttcaggatggccggcgtccacaaatttgacctgtggagcatgacgggctcatccatgatttacctgcctgaccggattgtggcgggcatttcctgcatgttcttcatcctgtccgtcctgagctgctattacatcctcctccggatgtttgacgtcaccatcgcctgcttcacctgcctgacgatgatactcagcaatcttttcctgcagtacgctaccagcggcctcccgcagatgatgatgctctttttctttgcctggggcatccactttttgtacacggccctgcaaaacaaggaggaaaaccgcgcattcctgtggcctctcatcggcagctccatctgtttttcatgcgtctgccttaccggatggatcgggctgtggcccatggccggttttctgatttttgcaggcatccggttcaaaccgcacggcctgtactgcattccgggccttatcactctccttcttttcctggcctaccccatttacattaaccgctccctcagcggaggcttcttcggaacggcttattacaccatcttcacggggctgaccggcaatgaagaaatagcgatgaacgccctggtttccgggagcattcccatcgctgcccaaaaagtagtcacttccgtcatcaacaacattctgacacagggtgaccttctctacgaaaacctcggcaatctccccctggccatggtatttctgctggccctcctgcataaattcaaacgtccggaagtcaaccagtccaaatggggcatctttgccatgtgggttcctgccgtcatcggcatggccatttatacctccaataaaaccggcatttccttagggcaaattcaaatcctcttcgctccctttttcacggcctatggcacggcatttgttctcaacctgatagccaggcattccaacaaagagctaatctccatccttcggggaggcgtcctgctgctctcccttctcatcacttcccttccgcttctgctcaaccttccgcacattgtgcgggtgggcatcctgacggccggccgcggcattccggcatggccgccctactatcccctgggccttaaccgggatcttcgcacccagacggcggaaaaggatttcattctcacggaccagccgtccgccgtcgggtggtatgcagaccggaaagccatcggcatccccaaaatggtggaacaattcatggtgctggaacgcattttgaaattccacggaggcaaggtgggcagcattctggtgactccttcttccacgtcaaaaatgaacctccgcaccatttcctcctcctatggagaattcactcccctcgttctggaaggcacggttctgttccagaccaaggataaaaaccccgtgtacatctttgaccacagccgggcgcttgcccccctggcgcagcgctttggaacgcctgactcccgccaattcattcagggagcggaaatgattctttacaaagaccttcaggaaaccgcccctcaaccttaattcccatatggccaaacaacggaaaaacgctcccggatttgaagaatccgtagcacgcctggaagaaatcatacgcctgacggaagcccccgtcaccgagctggaagacatgatagccctggtggaagaaggcaataagctcatccgtcactgccgcagcatcctgcatgatgcggaactgcgcattcaaactctcagcaacccggaaaccgttcaggataaaacggatactgatgaaccagacagcaatgaattctccctcacctgaacttccggaactgctggcaagcatccgcagccacgcagatctgatgaaaatccctgagtcggaactgcccaggcttgcggaagaaatccggaatactctcattcactccctttccctcaccggaggccacctgggccccaacctgggcgtggtagaactgagcattgcccttcaccgcgtctttgaaacgccgcgggataaaatcatctttgatgtctcccaccaggcctatgtccataaaatgctgactgggcgcgctcccctgatccacaccatccgccagcacggggggctttccggatttgccaaaatgtccgaatcccctcatgactcctacggagcggggcatgcgggcacggcgctttccgccgccctgggcatgtgcgcggccagggacctgaaaggagaagactaccatgtggtggccgtagccggggatgcggcattcacctgcggcaccactctggaggcgctgaacaatatcagccagaccaccaaacggtacatcaccattctgaatgacaacgaatgggccatcgacaaaaacgtaggagcgctggcaaaatacttcaactccctgcaaacatcggaaacgttttcctggttaagggataaaacggcctccttcattgaaaagctgggcggcacgcaggccagggactttgctttcaagctggaaggcaccaccaaaaaccttatcttcccgtccctgctgttcaacaaattcgggctgcgctatttcggccccctggacggacacgacattcccaccctgatacgcacccttgcctacatcaaggatctcaacgaacccgttattctgcatgtggtcactcagaagggtaagggctaccagcccgctctggacaaccccaccaaattccacggcctgggctcctattgcgtgagggacggggaaacgcaggccgcccccacccccacattctcccatatcttcggctccacgctggtggaaatggcgcgcgaggatgaatccatcacagccatcacggccgccatggccagcggcaccaagctggacttattcaaggaagccttccccaaacgctatttcgacgtagggatcgcggaagagcacggcgccctcttcgcctgcgggctggcggcggagggcatgaaaccctacatcgccatttactccactttcatgcagcgctgtattgacatgattcaacatgacgccgcgctgcaaaaactgcccgtgcgtttctgcatggaccgcgccgggctttccccggacgacggccccacacaccacgggctgtttgacattgccatgattcgcagtatcccgaacattgtcttcatgcagcccaaggatgaagccgaattcgtccacatgctccgaaccatgaaccattaccagaacggccccaccgttatccgctatcccagaggatgcggcgccggaacccccgtccccgccaaggcggaaatcctccccatcggcaaggcggaagtacttcagacgggacaggatgtaaccctcgtttccctgggcaccatgatcggcatcgcccgggaaaccgcctcgctgctggaagcccgcggctacaccgtcaccctgatcaatgcccgtttcatcaaacctctggatgatgaatgcatccgccgtcacgcagcacgcagccgggtggtctgcaccttcgaagaccactccatcagcggcggcttcaactcagccgttctcgaatccctggaaaccggagatgtcaagacgcccgtggaagccatcgcttggccggaccaatttattgagcatggttcggaatccatcctcagaaaaaaatatggactcacggcggaagccgcgctacaaaaaatcattccccacctgaactcctgatctgtttatgaaaacacgcaccttcctgctggcagcccttgcgcttgcccttcttcccgtctccgcgcggcaatccctgccggcctccccttcccctgcctggattcaggaattcaacaacctgccggaaacaaccagaaaaagctatatagcccaattccgcaaagcagaacagctctttgcccagaaaagaatcatggaatgtcttttttccctcatggagctggaaaaactttatgccggaaatccgggcttatacaacctccgcggcgcatgctacattgaaatccgcaatatcgaaaaggccctggaaaattttgaaaaagcccagaaactggatccctccaacctcaccatccagttcaacctggcggaagcgcattacgtcaatcacgactattccagggctctgaaagcgttcacggaactccttctccccttcaaggacaatcccggcatgacgcccctgctgcaattcaagcgttatatctgcgcccgcaaactggataaccagcctcttgctgcggaattggaaaagctgtacggcccgatggatgatacgccatactactactgcacccaggccatcctcaaactgatggaaggggacaaggaagccgcccagggacagctcctttccgccatccgcatctacggaggcaccagcgccatccaggccttcacggacgccatgacggaggctggcatccttccctccccctatgggcaaaccgtcccaaccgaacagccggtaaaaaccggactggaaaaacgccgttaatgaatgcggaagcgacggtcctgaagctttatcccctgggagaaaacggcctgattgccgtctggtgcacggaagaaggccttatcaggacggcggcaaaaagcgccagaaaacccggcagcccctttgccgggtgtctggacattttctatcagtgccgcatgcagtggacgcaagcaaagaagggggatttgcacaccctgacctccgcagacctgctttcgccgcgcctggccctccggaaaagctacctccggctcagtgcggcaggctatttcgcgcgcctgtttctccaaatgctggaaccggacacgcccatcccggaattttacgacttgctgcagagggcctacacctacctggaaaacaatgatcccacgctgcgcgccgtcctgcacttcgaacaggaactcgcccggctgcatggaatagcccacccaggcatcccggcgcacgtcattctgaaatcccacttcggcaagcttcccccacagcgggaaaaactgctcggaagcctggaacaaaaagaaagctgagcaacatgcctatcctgctttcatcctcagcagggaatgttccccgccccgctcaacacgtccttcctccgggacgggatgcgcattgttccgtgcgcgagattgacttgtccgcagccttcgggcagaatatccggcacggttttactgcatgaagatccttgacagatacattgcccgccagctgctgggtgtcacggccctgggggtaatggccctgagcgccctgctccttctgggcaacctgttcaaggaactgcgtcccctcctggtggaaaacaaggctcccatcagcatcgttctggaattcatcttccaggtcatccccttttcgctgatgttctccattccgtgggggttcctgacggccgttcttctggtgtacggccgtctggcctcggacaacgaactcacctccatgcgcatgtccggcatgagcctgtggcgtctgagcgcccccgccatcgccatcggcatcgccctttccggcctttgctactggattaacatagacatcgcaccgcgcgccaagcaatccatttccgagttgctcatcaaagccgcatccatcaacccgaaggggcttctcaatgaaggccaggccattaccaaattcgacaacctggaaatctacatcgacaaacgcgtggacgacgtcatccacggcatgcatatctaccagaaagcggacgacaaatccccgtctgtggccatgcactcggaacgcgtgaccatggatttctcccccgagaaaaaaatcctcaccctgcatctcatcaatcccctcatcaccacgcaggaagaaggttccatctcccaaagcgtgaccatggacgagatgcctctgagcatcaacctggacaaatcccgctcccggcgcatcaaggccaaccgcttcaccaaccgggaaatccgggaagctctggacacgcccggctatctggataaaaagcagaccacggaattcgccacggaactgcccaggcgagcctccttctccctggcctgtatcgtctttgccctcatcggcgtgccactggccatcaacacccgcagaaaagacacctccacaggatttgccctgggcatcctgatcgcctcactctactttctggccctgatctttgcagacttgtcccggaaaaacgacacgatgctcccctatattctgctgtggcttcccaacatcatcacggttgccgtggcgttgcaccttcacaaacgggccaggcacgagggataagcccccggcggaagcccttcccgctggcgtggaattagctttcacagcatgggagcttcgggtaacatgatgtgcatgcagcacgtccccaccatcgccatcgtaggcaggcccaatgtcgggaaatccgccattttcaacagaatggcaggcaggcgcatcgccatcgtgcatgatgaacccggcgtcacccgcgaccgcctttccgccccctgcaagattacggaccgcgcctgtaaaatcatggatacgggcggtatcggcacgcgcctgagcgacggctttgcagaacaggtagaggcagaggcggacattgccataaaaacggcggacctcatcctcttcgtgctggactgccgggatcaccttacacctatcgaccagagcatcgcggaccacctccgtaaatcggacattcccgtcatcctccttcttaacaaagccgaccacgaaaaacaggatcttaatctgggcgaatttgccggactgggttttgacgaccatatctttctttccgccgcccacggcagaggcttttccgaattagcctcccggctggacggttttctcaagcagaaaggggctccgcttaaagaagagctggaggaagaaccggaaaacggagaggaaacggcccttcccatcaaggtagccgtagtgggacgccccaacgcaggcaaatcctccctggtcaacaccatcctccgggacaggcgcaccatcgtctccaatgtggcgggcactacccgcgatgccattgacatcccctacctgcacgacggccagccctacgtgctgatcgacaccgccggcatgcgcccacgctcccgtcgggacacctccgtagaagttttctctgccatgcgcagtgaaaaagccatccgccgggcggatatctgcctgctggtcattgacattgcggcgggcatcacgcagcaggaccgccgcattgccggcatcattgcggaggaaggaaaaccctgtatcatcatcgtcaacaaattcgacctcttccatccgaatgcctcccgtaaggaccgcatggcggaagtggaggaacaggtgcgcagggaactcttcttcatcagctacgcgcctttcatcgccacctccgccaaaaaagcggaaggcgtggaaatcatcttcaaagtcatcacgcgcatccgccgggaatcccataacctgcccactaccggccagctcaaccgtctgatccagcttgcccagcagatgaatccccccggcgccgccagcggctctgccagaaggttgaaaatatattacgccaccacagcggtggaccccaagtacaatactattcccgtcccgcgctacgttcttttcgtcaatgacaaaagcctgctcacggacagctattcccagtacctgcgcaacaaaataagggaagcctaccccgctcccggcattccggtcatcttctccgcacgttcacgcgtgcgcaacgactgatcatccctccttctccgcatgctctccgtcaggaacctcagcgcctccttccacaccagggccggcattgtccgggcggtaaggaacgtgtcctttgatgtagccccgggggaaacgcttggcatcgtgggtgaatccggatcaggaaaatccgtcacctgctactccatgatggggctcattccgatgcctccgggccgcattgaaagcggttccgccatgctggacggcacggatctgctccgttgcccggaaaaggaactccgggccatccgcggcaaacgcatctccatgatcttccaggaccccatgacctccctcaacccgtacctgaccatcggggagcaggtggcggaaccccttgtcattcacgaaggggccggcaaaaaggaagcgcgggcacgcgcgctggaacagcttgccctggcaggcataccggatgcggaacagcgcatggacgcatatccccaccaattctccggcggcatgcgccagcgcgtgatgattgccatggccctcatcaccaggccggaaatactcatcgcggatgaacccaccaccgcccttgacgtcactgtccagaagcaggtgctggatctcatcagaaaacttcagcaggacatgggtacctccgtcatcctcatcacacatgacctcggcgtggtgcgccaatacgcggaccgcatcaatgtcatgtatgcaggccgcatcgtggaaagcgccccggcgaaggaacttctggaacatccccggcatgcctacaccagagccctgatgaaatccattcccgggctgcatacgaaaggtacccccctctataccattcccggactgcctcccaacatgactcaggagccatgcggatgcagcttccgccccaggaacaccctcggaaacccggcactctgcctcacggaccgggaaccggagctggtggaaatatctccggggcactcagtccagaattgtccgggctgcctagcttagcttcctttctttcctgcctgtttgcacgcagataatgccgcgcacaggaaaaatggaaaacaaagcgtcaataacggtggttaccccatcgctctccagagaaaaacaacaggtttggcaatcaagagaaaaaactttcttcattcgcccgcccacgttaaggaaatctctaaaggcctgccccctgccatgacattttaacgtgctcagcacctgttggaaccacgccacggaaaatccttttaacagaattgatttccgcacaattcttccagaataccgtaaaaacggcccacatgcaccccgtccaccagcacatggttcgcctgaatggccacgggcatcaccatcctgccggaagcatccgcctccatcttcccccaatggatgaggggaaagtattgtccccgaaacactctgtaggcactggccacctgtgtgaatggaatccacggcaggcagctgaatacggcgatatccgccctatggcacggattcgcctgggcgggagcaagtttggcagcctgcacaagaggaacggcatgtttcaggaaatcagacaactccatccggtattccactaaaatctgagtgaattctccatccgcagccagcaccggaaccagggcatccacggactcatactcccatacatccccttcctccacccgctggcgcagctggggcaccctgttcaacgccttcagcagcacaaacaggcacaaaatgaaaaaggaaaacccctcccgtttcgcataacggtacagggcatccacccggaccggggacgtaatggaaaacatggggcagtcaaacgtctggaaatactcataatgagaccttcgaggccaggaagagatttctattttctttttcatgcacttattttctattcaggggaggcgccccgtacacgtttttgcgtttttgctccggaagcaaaatactgaacaggacgggagcagtcaaggtggcgatgcccgtaaatatcccccccacaggatgccagcaaaaagacattaccagaagctttccctcaaaaaagcaaatcaggagggcgatccacaccggccaggttatcgccagccagcccccatccagtccggcatcatgaaaacgcctcacccccagcgaaatgaaacaaaataaaaagaaaaacagcagcaacagtcccagcaaaaaagcaaaaagtattccgaaaggaagggattcaaaccaaacgctggctccacaaaaacacgccagccatacgggaggggcaaacaccagaagcgccccataggcaacaaccgcctcccagcgcgaagaacgcccccgcatcgccaacagggaaaacagccaattaaaatgaggcttcctgccgcacctccatactttgccaggtttcatccactcctcagttccggcatcttgttccttgaaagactgccattccggcggagttccggaaacatcccctacccatatccagtcctccgaatgttcttcccggaccatcagacccagcggcaatccggcatagcgtatttcccgaatcaaaaaatcgacatcgaccggtccatgcaattccccatccggcgtatggtaataataacgtttcacaacagcttctttccttccattattccccggctctaccggaaattccaacccggctgttcccagcgccaaagcattgattaatgcttctatttattcaattatcaactatgttgcaacaaagaacatcctgaatgccccctacccctcgcgaacggaaagcaaatccgttacggacgcatgcttcatgcgccacgcaggcagaaggcacgccaaggatgagagggaaagcaccaaaagcacagcacaggccagatgcgcccaaggcatcgtgacaggaggagtaacgacgccgaagtgatagccgtattccaaaatctggatggagcaccaggcgcccaggactcccagcacaagactcatgacaacggagcacagggaaaccatcagcgtttccgcccagagcatccgcatcaccatgccgcccggcacgcccaccgcacgcatcaatccaaactcccggcggcgggactgcacggaagccaagacggtgttaagtacggccagaacggcgatcaccatcatgatgatgggaagcttgctcatcgtaaaaatcacatcgtccccgcggctggtaacgcttcctcccaggctttcccgggtcagggccttcaccagaggcttggcgccttcccctccgttttcctgctcccgcaccttcatcagggcgtattcccccaggtcgttctgaagttccacgttgctgatccccggagcagtatccccccagataaactggaatccctgatgagcgtattcctctttgagccagcgttcatcggcaatcgccaaagcggcaacaaaacccccgcggcgcacgcgcattccgctggtcttggtcaaccaatgccagccggggaaggaaactattcccgccaccttccagggttctccccgtacggcgccccccctgccccggccgcgaataccggcagagggctcatttccggaacggcgttcccgggaagacggattaaccagcatcaagtcatccccgaccttcaaccccaccgtccgtgcaaacgtgtccggaatcaggagagaacgggtggattccagcatggcataagcctcctgcggatttccggaaacaaacacggggttgaacagcggatggctccccccggccatctccgccacgggaatgccggccagtacgatggaacggttgcgcatcccggaaaaaccggggcttttcatctgtgccggagcaatatccggttcatccacgtagatgggatacattcgggaattccgcaggctggggcgcgccatcagctccggaacatccgcagatttgaactccgtatgcaggaaggaaaccagggttccgggtgttgacgtatccggggaaaaaggaaccagcatggaatagccccatgtctgcacccccacaaaaagagagaggcccacagacatggatacggcagttcccacggaacggctgaggttgcggctgagctgcattttcaggaaagaatgcggaacgtgcagcagaaatccggtaatccatgccccggcccactccgtcacgcgcacgaaggtgggggccagaaacagcgcaccggctaccaagccggggtaacccagccagaaaaatatccatttgcgcgtttctacctccaggcccggcaacagcagggccgcaggctgaagacacacgcatgcgaggcccgccacgacagaccacacaggaacacggctcaccttcccgatgaatccggaggaaggaacggccgcttccagcggagactggtgggaagcgcgccacgcaggaataatggaagccagcaaggccccgcccacagcgcatacggcggcggttaatactgtggaccaggtcagcacgggtacagaggcagagccttcctccagcaggtacaccaggaaaaagcctgcggccaaccctcccagcaatgccggaatgcacagaaaaatcccctctcctgcaatcagcagtgcaatttgcatgcgccccagccccagagcacgcatcagggccagtctgcgggcacgttcgctgacgccaatgctcagcgttgtgaaaataatgaaaatacaggaaaacaggacaagccagacggacacttccgcgctatccttctgtgaacgaacggaccggtcgctggaaagccgccggatgatggaatccgtatccgccaccgcagcggaagcctggaccagctcctgccggaaattctcagcaaattcctttttgtccaccccttccttgagctgaacgtaaatcaaattgggggcaaaaggctgccccgtaattttctcgcataccttcacgggcacaaaaagggaggaaaaagccgggccggacatgccgcccggccccataatgacgccgggggtggccttggcctgcttgacgatgcccacaatctttacgtcgtacacatgcgttcccacgcgcacgttcatgacagtccccactcccgcgctgaaatatttggcgcttccgctgcccagcaccccctccatggctgaggaggaagccatatccggccaaattccctctttcaattcataaggacactccacagcatggtttcccaccaggatggggctctggggaggaattcccatgcggtcgcgcgtctgctcgtcaaagctgccccgctcatttccgcagccgatttggaggcgcggcacctggcacgcggcgttcaccgtttccacaaggggagaggcggccagacgggcgggcagctccgggtcacggaactgcgggtactgtccgggaggaaggggccctttgggagactccggcaccaggcagaggtcataattccccatataggcctccgcatcattgtcaaactccctgaccagcgtatcatagctccccatcatccatacaatgaggctgacggagacaaggatggcgaacacgctgacaaccatccggccggggttggcgcgcagatccctccaaatcagtttgaacatcaacgtcataaggcgtcattcagcgtacgttcatagaaggaggacaattccgcaggaccggcaaattccgctgtggatctgtcgtccacaatactgccgtccttgagtacgattacacgatccgcccacatggctacgtccggcgcatgcgtcaccaggacaaaagcacaaccttgcgcacgatgcaaatcccggaacaaatctcccataagccgggtattttcagaatccagattgcccgtaggctcatccgccagcaccagagcgggaccggagaccaatgcacgggcaatcgctacgcgctgctgctccccgccgctgagcgtatccggcatggcatgccgacggtgagacagtccaaccttttcaatcatggcgtccagggcggcggaagccaccttcctgcctcccgccagggacggcaacagaatgttttcctccacgttcaaggtgcccaccaggttaaacatctggaaaatgaaccctacacggtcccgccggtacaccgtcagggaggcatccgacatggaaccgagatccatcccatccaccgtcaccgtgccggaatccggagacagcagccctcccagcacgttcagcagagtactttttccggagccgcttgcgcccatcacggcgacgaactctccccggttcacggtaaggctgatatctttcagcacagttatactcccggaaccggatttgaaaccgcgcttgagatggctgacggaaatgacgggggaactcatggcggaaacgcaaggttaaaacgtggtcttcaggcctacttcaaacgtgcgcggctctcccaccgtgcactgcacggcatggcgggtggactgcacatactttttatcgaagatattatacacagccagcctcagcgtggcatctttcagccatttggattccggcagggggatttccaccgtaaagtcgaatacgctataggaggggatggtgtagttgtccgcaatttttgcgccccggaacgtagcgtaataggaatccttgcagcggtagcccaggcccagcaccgtaccgttcagcaaccctccgtcaatgcggtacttctgccagagggccagagcattcggagcaatcgtgggatacacttccccggtggtccggttcttggtgcgggtgtaggtgtaggaaagataggaactccaattcttggttatttccccgttcagggaaagttccacgccttccgccctcttggagccgtccgaatagtaccggttggtatatccgtctatggcaacaggcgtattattctggatgatgtcaaaccaggaagcggaaaaccacaccttatcaaccgggctgacccggaacccgaattccatctggtccgtacgccaggaatcggtcaattccttcccgttttcatccagatacccgaagttgggggcggaggtacgggctgcgttggcgaacaacgctacgcgttcgccgaacatgcgggtaattccgaagcgggggctccacgcaaacgcataattattgtccaggctgaaatgcgcgtcaccgcgaacgccggccagaaaacgccactgtccataactgaggacatcctgcagcagaaaaccagccctctgcaccacggtatccgtcgcattggcgccggaataatcgcgccctgcagggaaaaaaggaggaggattgtacagggaaaaatagccgttcgtatttgcggtggcgtttgtcaccaggctggaaccgtctccataagtgctgctccccgtgtaagaaacgcccatcagggcttcatgcttcacctgcccggtcttaaattccgccagtgcgttggaataaaaattccagttgatattccactcgtcgctccaggcggcttcatatttggcctttccggaagcaatcatctggttgtaataatccgccgtgctggttcctctcccagcggaagaggaaatgccccagacattatagtccacatcgctgtacccaataccgccgccaatgcggatcgtccatatcttttccagcttgcgttcgaaatccagcatcgccagcagggatttggaattaagccttccgctcggagaaccgtaccaagcgtcatacggccccacaaaatggccgcccagcacagggatgcccatggtcgtcggagaattctgatactggaaactggtcgtcagcaccgtcttggtgcgggaatcatgctgccagcggaaaatgggggacaccgtgtacttctggcctccgttggctccgttgctcagccagaacgggcgttcatactcggcggctaccaccgtacgcagggcaaatccattcgtttcatcccccctgtaccgggtatcgtcaatcgttgcgcggtatttctgcccgtgatgggaaaggcgggcgtaagccgtcaactccgtccgttccaggaaatcaggctccttcaggatcaggttgatggaaccgccggcgccgtatgccccgagcgtactggtctgaccgccggaaatggaaccgatggggcctttgacaatctcaatattttctatcagggacgtatccatgccataccccatgcctcgcgggaggggcatattgccgatctgaacatcactgccggcaaagccgcggatggtgtactggtccgccgtacgggacaaaagcatgtccccacccgtattgacggaggaatccatacgcaacgcttccaccagggaatcggaccccttggaatccatcaggtcccttgtaatgacgtttaccgtttgcggaacttcctccgtcttcatgttcgtaagagtagcggaactgaccgtttccgcccgcagggacctggaacggatggtcatcacgcgttccggcatttcctgcacgccttcctctgctgcggcgggctttgtctcggcataggcagattgtccgagaacaagcaggctcccaatggcggcagcacggtgcaggccgcgcccctggcggcgatggcggggggtattcatgttggataaacgcataggggcaagtataggacggaacaaaaaaccgtccattcccgtttgttaacaatttgataacagaccgttccttttccttccggcaaaagcgcatctgatggcagaacggccccgccctttcacaaacccaatgcctgcgcccggctctccgccgcggccttcagccattcccgcaatgcctccttatcccctgtagccagccaattcctcacttgtcccagctgggacagggcttcatccagacgctccagaacagcaggagcattttcctccagaatttcagcccacatggacggttcccccatggaaacgcgggtagtatcacggaaacctccggcggataccagccccagcagcttcacatccccaccgtccagggcgctgtggacgcacagggcagacaaagcatgaggtatgtgggaaatgcgtgccacggaagaatcatgatccgccgctttcatccggatgcagtggcagcccacacgctcccagaacctctggagcaacagcagcacatcttcatgcacatgctcgtcattcgtcaggatgcaggtcgcatcccggaagaggtccccggaagcatgctccataccctgcttttcggaaccggccatgggatgggagccgataaacgccacgccggctttcttcagcacggagcccacggcctggtgaacaccccccttcacggaacccacatccgttaccagtactcccggtttcaataaaggaagcatgtcggaaacaaggcggggcatcacgccaaccggggtagccagcacaaccagatccgccccctccaccacctcttccatccgggaggaagcggcatgggcggctccggaagaacgggcatattccaacggttcttccctcctgccccacaagcgcacgtgcacatgcggcaactgcttcctgacagccagcgccaaggacccgcccagaaggccggggccgagaatggcgacggaggagaaaaaaagctgctttctggaatattctctcatggatttacagggaaatacatcagcgccccggaacatcggcatgttcaggggcgcggcgtgatctcgttgcggcggccgcatcagggcacgcggaacttcttgatctcgttggggaagttggtgtcccgcaacaccgtcccggagggatacggcttattggtgctcctgttcaaaatcttgatcttcttggtacggtcatacgggctgaccaccaccgtgggatccgccgtaggccacgccaccgggatggaagaagaagcgggaggttccacaggcctgggggcggcaatgccggaaccggcggagtcacccacgggattaggaacgacgggcttgggaacaacgggcttgggaacaacgggagccggaggcgtgatattgttggccccgcccaccatattgctgatggttccagaattggtccgggcgggatccgggttaaatccggaattctgcccggccatcgggtccagagaattttcacgctgaatatcattcaacaggctattgccctgggcgcccatagcaccggacggatagacattttccgtaggataaatgccgatggggcgttcattcacgcgctccgtttcacaggaaggcagaagaattgcacctgcggccagcagcacgcctatcgtcggggaagtattcatataatctctcttcgggtgatagctttctgccagcatcctacggtcccgcaacctcatgtcaaccataaagcctgtttaccgaacctcttcatgacaaggaatcttcggcttccgtccccgcacgcgggcaaagccgcccgaacaaacgtgctcgccgcatttcttttacccgccggcagcgccggaacagccctggacgggctcaacaaagggaagagtcgcaaaacggccgttttaccgcagacaggcgtccgaatagccggaaagcggcacaaagacggaacaaccatcactccttatcaacaagcgctccaacaggtactcctgccgcagccttattcggaagaaaccggagctccatcccgttcgccagcaggaagagacgcttccctcccgaacatgccgcgccggcctccggccctcccctgcccgccctcttcaaaaaaccggaaaaaacgcttccccctcttcccgggaacgcgcctgtacgggaacagattatccttccctaccccccatgatctgctacaatccgccccacatggatgacgtacagacatctaagaaaaaaatgccctcaaaaaaggaatggaggggattttattccctgattctcattcaagcccagaacgctttcaatgaaaaagccgcccagttcctgctgattccgctgggcgtctggctggcttccaccaacgccgcatacggaccggattcctgggtcaactccctccagtacattctggcctgcatctttgttctgccctatattctgttctcccctttcgtcggatggctggcggactgcttctgcaaggcccgaatcatccaattcatgtctttcctacagattctggtactgggggccatgcttctgtgttataaatacgaaaacattgaaatggccgttttctggttctgcgtcttctccgtccaggcgaccatcctgagtccggccaaaaagggagtggtcaaggacatggtaggctcccggcagctgggctacgcttcagggctgatggaaatgagcctcatcctgtccatgctggcggcccagataggcatcttcgcctggttcgacatcctgcaagtctcctccaatgacggctgggaagcagccgctttccccacattcatcctcacctgcatcgccgttcccgtagccattgcgtccctttacctcccgcggtatccggccaaccagaccagaaaattcgaatggaagctcttttacgaacatttcgtgcagctcaagtatctctggagccagcgggatttgaggctcagcgaaatcggtgtttcctacttctggttcctggccggagccctgatgctcatctccctccagatcgcccaggaacaccccattgacggcaccggattcagcatgtccgcggccattctcatggcatggctcagcggcggcacggtggtaggcggcgtcatcgcctccatcatctgccgtaaaaagattgaactggggctcatccccctgggcgcaatcggcttcactatcgggtgcatgttcatgtccttcttcgcccccggctccctccccagcaacatcgggttcggcatcaccggggctttcgccgccgcgtacctggtgccgttaaacgcccacctccaggacaattgcgacccctccaaccgcagcaccgtaatcgccgccggcaacctgatggactgcctgatggggctggtggccgtcggcttccagctcatgctcaggaacatcttctccatccagaaccaattctgggtgctggccgccctgggcgtcgtcattaccattgtggcattccggcttattccccgtgaattcatccgcatgatgggcctctggatcatgaggattgtctaccgctcccgcatcatccaccaggaccgcattccggaagacggcggggccgttatcgtctccaaccatgtcacctacggggatgcgctgttcctttctctcatttgcccgcgccccatccggttcatcgtggcggaggaattcgtagccatccgctggctcggctggattctggaactcttcaactgcctgcccatttcctcccgtaatccgcgggaatccctgtccaaggccatccaggccctgaaggccggagaagtcatctgcatcttcccggaaggccagctcacccgcacgggaaccctgtgcgccgcgcgccgggggctggaaatgctggcgaaaaaatcgcgctgtcccatcgtgcccatttacatggacgaactatggggcagcatcttctcctactcaggcaaccgtttcttctccaaagcgcctctccgcgttccctaccgtttcaccgccgccatcggagagcccattgagcctgatgccgtcaatccccgcatggtcatcaacacgctgcgggagctatcctccacatgcctggaaattgcagccagcatcggcagggatgccatcctgaaccatctggagcgcatcgcccacaaaccgctggtcttctctaaaaacgcgcggctctccgggtatgaaatagcggaatgtctgatgaacgacaccgtggaagcagagcatccggaactcaggaaatggctgtccaccctgctggacagcacccgctcccaaagccgcctgtgcgacttctggatgaacgcccagcagctggaacgggtgaactccctccagccccgggaactgctgctcaccagcgtaggacgcgaagaagtccacgaaacggtggccgccgtcctgtggcccatcctcaccagcactcccgtttacctcatcagcgacggggaccacagcatgccggaaggcatcaggcagatagccggctccgatttcctgcgccgcaggctctacagcctggttccgaatacgcgcacgccgttttatgacttcagcggctcgggcgacctggttctccccaacatcggctggaggccctgcttcgccacggaccgcggcattatcctggccatgtccatgaagagaagcgtcttcaagctggatgacggcaccgtgcagctcggcatgcgggccaggacaagagggcgcctcctccccggcttttacctgaatccccctctttccaacgtcatcgccggggctaccctctccaccccttattccctgccgcccaacctgtatctggacgagtcgggcttcctggcggaactccagtcttccaaccatgaacaataactcctcgtcaacccgccttcccatcccgcagtatgtaatgacgctggcgcacgcggcagccctgcggtcggaggacccgtaccgcaaggtgggagccgccgccctggatgcggacaaccgcgtcatcggcaccgcctacaacggactgtatcccggattcaaggctcaggacaccttctgggccagccgggaagaacgccagaaatacatgctgcatgcggaaatcaacctgtgcagcctgttccggaggggggaagccaaggtggtggcatgcactacgatgccctgtacctcatgcatgcaggcgctatgcgcccatggcgtaaagaccatttattactgtgagccttatgacaaatccgaagctcctgccatcgccagcctttacggcgtggaactgatccaggttacggactatccgctcagccggcacttcccccttgtcctggacagctgatgcccggaaaatcaatcccggtgtacgcggcatgtccaaccggccatggagcggggaacgccgtcaatggcagggtccaaatcaagaccggtttccgtaatggtgcccgaagtaataacgcccgcattccgcccggcgtcgtcaaaggcaatgttcacattcgccatggtacaggcggagctgctgttggcagccggagcaatattcaatacgccagcattttccccgctattgaaccggtacgtataaaccccgtcgtacacggctcttgtatccattctgataacatctacgtcctgcccgctgaactggagctggaataagatgcttcctccctcaaacaggcttacctgctgtccgctcagggaagtgttcccgtcgtctccggattttcccgaacctccgccgcacccggacaacaatccgcacaccgtcacaggaatcagcaacaagacagggaacaactttttcattcccggaaaaatgcacaacagaaaaccacaagtcaagtacactcaactattattgcatttttccaacattttttaacatcacaaaaaaaccgcctgttttcacaggcggtctcaagaaaacacggaagcggtcagccaacccacttccaggtaatgggtatttcaatatcagggtgcaggctgtgcttgaccgggcagctcagagcagcctgttccagcagcttcctgtccggataatcggacggaagaggaacggtaatgacgacttccagcttgccgatacggcggggatccgcattcatgtgtttggccacttccaccgtcatgccttccagattaatccccttacgttcggcaacaatacccatgatcgtgctcatgcagccggcaagcgccgctcctaccaggtccgtgggggaaaaggactcgcccttgccgttgttgtccacgggggcatccgtggaaagcgtggccccggaaggttcatgaaccatggaacaatggaggccgccctcgtacgtcgttttagtttttaccatggccttattttatacaaggctccccgccatgcaacacacaaacattgaatccccccgttctttatggtaaccgcctttgctatgagaaactttttgaaagcagccgtcggctgcctgggcatgatcgccgggtgtttcagcacaggggaggcccaggacttcggaggcatgagcttcggggaagcgggaaactttggtccgccccagacatccggttcctccaaggctactgtcacctcctatggagaagcctccttcgtcatcgtgacggagctggcgctgccggaccactggcacgtttactacaaaaatccgggaaccgtgggccttcccatggaagccgctctccagcctgtgcccggcttccgggtggaaggccccttctggcaaatcccggaactggggaaagggcttgtggatttttacggatacagcggaaaagccaaaatggcgttccgggtgactccggaaaaggatgcccccccggaagcgacgttcaccaccaccatgacatggcaaatgtgcgcggaacagtgcgccgccccggaaaccaaaaacttcagcgtcacactgaagcgcggagaggggcagacagcccctgacgcggcggaattgaccgggaacatggcagggcttgccgcccccgactgggcggaagggctgaaagcccggatttcccaggaagggaaaaccgtcaccctgcacctcaggacaaacggacgccccgtcccgcaggattccgtctattttttctgcaatcagggggaaatcaaccctaccactccccaaatcttcaaaaaactggatgactccaattatgagctgtccatgcaattcaatgacaccacggacggcctttaccccaacaacctgccggatgcagacagggggaaaccgctgaccagcctttccggcatcctgcgcgccggcagggaaggcatcatcatcaccgcggacgaccaccccttctccggggaatctcaggcaacagccgccggaacggaatccgccccggaatcttccgcttccatccccgctcctccgctgatgggcctgggggaaatcatgttcttcatgttcatcggcggcatcatcctcaatgtcatgccgtgcgtcttcccggtaatcggcctcaagattatgggattcgtccagctgggagggggggaacggaaaaaagtgctggcccactcccttaccttcgtactgggcatcctgatttctttctggctcattactgccattctgattgcgctgaaagcgaacatgtttgactggagcgccccagccggccccggcgtgttcagcggagacttctggctgggccgcggcgcggagggcgttgtcaactgggcgttctggtttgaaaacccctgggtgaatttctgcctgctgggcctgatgctcgccatggggctgagcatgttcggcgtctttgaaataggcgtcaaagccacgaccatgggcaacgacctccagcaccggaagggttatgccggctccttctggtccggcgccctggctacggtcatctccaccccgtgcagcgctccgttcctgggccaggctatcggcgcggccatgctccagccgccgctgggcatcgtgctctgcctgaccatgatggggcttggaatgtcccttccctacatcattctgggagcctttcccgtcctgaccagatacctgcccaaacccggcgcatggatggaatccttcaagcagtccatgtccttcctgatgttcggcaccgcagcctacttcctctggatttacatggccttctttgatacagaaaaccatcctcaggacatcctgttcctcttcttcgggcttgtgctgttttccatggccttttgggtatacggcagatggtgccccatgtaccgcagcagaaagtcccgcatcacgggaggcatcttctccgtaatcttcctgctggccggcctgtactacatgctcccgccggaaggagcagcctggttcggccgcggttccgcccccggggcggcggagtcctccgccgccgcagcaccctcccttcaggaggaaggaaacatctggataccctggagcccggaagccatgcaggccgccctggacggagggaaacccgtttatgtggacttcacggcccgctggtgctccacctgccaggtcaacaaggcctcctatacggatgaagtgctggccgctttcaaaaaatatggcatcgtcatgatgaaggcagacaagacccgcacaaatcccgccattgaccaggaacttaaaaacctggggcgcacggccgttcccgtcaatgccctgtatcttcccggcagaaaaccagccgtcaccagggaactcctgtccccggcctacctgctggaattcctggaaaaggaaatggaacgctaggacgtcttgtcatgcgggcggcaatccgccgccctccctccaggccatgcagggcagcaggaaaacggggaaagcttacccttccccgttcaacagcggcagcaacgcgtccgcccatgcctgataacccttctccgttaaatggacatgatccttgaacatgccctccctgaacgtcccgtccggcttcagcaggctgccgttaatggataaaatagtggtcctcggaagctcaaacctgcgcagcaaacggttaatctcctcctgcctcctgcgcaatgggctatcgggatcggggccgtagggagtcacctccatcaggatcaaacgggtctccggaaatctcttcagcaggcgtacggctatctcccggatgcccttcaccgtctgcgccgcgggctgccgccctttccacaggccgatattattcgtcccggccagcaaaatgcaatagcgcggagaagtcctgactgccagtcccgtatcttccatgcgccacagcatgctgtccgtcctgtccccgctcactccgaagttgaccgccttcatcggcacgaacagcctcttccacagcgcggctccttcccgttcccagcattctgtaatggaatcccccacgaacagaatgccgcattccttccccagcaaattttcccggaccgccttgtaacgggccggaacccacggctgggtattcagtttgggaacatcgggcggatccggaacctcatctgaaggtgccgcatacacggcagaagaagcaagggacagcaataaaaaagcggcggaaaaaacagaagcattcatcttcttccgaatacgcggcccggaaaagcattctttcccctgccgggaaaatcatgttctcaccgccttgcccaatacctccaggggctggccggacaaattcaattcctttaccagaaaacggacaatcagcaggcttgccagcgcatcatacaaagcgtcatgccaccggcgcgaaggaagcagagcctccacggaacaagtcagccccagggcgccgcacaaagaagacagggaataatccgccagaccgggaacgcacatccggcctagggccagcgtatccagccacgggccgaagccgtggcccggaaaccggcgcaggaacttccgttccgtggccggattatgccccaccaccacggactgccccagccgggaacgtatctccggccacagggagggaaaagacggggcatccgccagcatctccgtagtaatgccgtgcacctgggaggcggaccataaaaccggcttctccaccgcaatataggaagtccataactcaggctcgtcctccaggcggggacatgcggctatgcctatctggacgggctggtccgtctccccccgggccgctccggcggattcaaaatcaatggcggcgaaatgcaggccgccgattgtatccgaaagcagaggcatatcagaacaactccagctgagcatattccccggcaggcatatcgtcttccatatccgtattcttggctctcggttccgccagccgggagcgctccttcctccgggggcgcgtggaattcatctccagatgggacaggatggccttggcgcggtccacaatgacggcaggcatgccggccagtcgggccacctggatgccgtaggacttatccgccgcccccggcacgatcttgcgcagaaacacgatttcctccttccactcgcgcacggccacattgtaattctgcacgccctgcctggaattggccaaatccgtcagctcatgataatgcgtggcgaacagggtgcgggacttcaactcgtcatgcaggtactccgccacggcccaggcaatggaaagcccgtcaaaagtggccgtgcctcgcccgatttcatccagaataatcagggagcgctccgtggcattattcagaatcagggaggtttcgctcatctccaccataaaggtggactggccgcgcgccaagtcgtcgctggctcccacgcggcagaaaatgcggtccaccaaaccgatatgggcggactccgccggcacatacgctccaatctgggccatcagcgtaatcagggccacctggcggatataggtgctcttgcccgccatattgggcccggtcagcagaataaggcggttttcctccggttccagaaaagcgtcattgggaacgaacacatcgccggaaacattctgctcaataacgggatgacggccattgacaatgcgcagggtcatggaattgtccagaacggggcggcaataccggtactgctgggccccctccgccagccccagcagcacgtccaggtccgccatggcatccgccgtaatctggatatcgtcaatgtggcgccccacttcctcgcgcaacaggaggaactgctcatactccacctggcgggaacgctcgtccgcccccaggatggtattctccatctgcttgagttccggggtaataaagcgctccgcattcaccagcgtctgcttgcgctggtaatccgggggcactttatcgtaatggctcttcgttacttcaatgtaatagccgaagacgttattgaagcggattttcagggaatcaattcccgtgcgcttgcgctccttctcctgcagccgtgccagccactccttcccgtcgcgggaagccagacgcaattcatccagaccggcatggtacccttccctgatgatgcctccctccttgatggtcacgggaggttcatccaccagagcgcgctggagcaaatccaccagctcatcaaagcagcccatgcgggaacggatgctctccagcatgtccccgccgccgggcagggattccagatcatccctgagcgcgggaatacgcgccagggaggaagccagcgcctggaggtcgcgggcattcccggcgccctgggaaatgcgccccgtcagccgctccatgtcccgcacattcttcaggctctccctcagcttgctcatcaggtagggttcctgaagcagaacggcgatcacctcctgcctcgccaggagcttttccagatcgcacagggggtggagcagccagtcccggagtttgcgcgcgcccatgggtgtgctcgtcctgtccagggtccccagcagggaaagcttcacgccgccgcgggaatccaccaggtccagattcctctggctggcctggtcaatcagcacggcgttctccgtggcgcgcacggaaatgcggcgcaagtggtccgtggggcggcggagctggtagcccagataatggagcaccgcgccggacgcccccagggcggcggtcatctccccgcagccgaaaccgtccagggaatgcacccggaaatggttcagcaaattgggaatggccgtggaaggcagaaaagtatatccgtcgtaataaagcgtcgggtgggttccggggaagcagtccgtctgctcgtcgctgaccaggagttcggagggattgatgcgggacagctcgtccagaagcaaatccatgtgttcgaactgggccacggaaaattcccccgtggtatggtccacgcatgccaggccgaagcgcttcttgtccttgtacaacgccacaatgtaattatggcgggaggaatccagcaaattcatatccgccagggttccggcggaaatcacgcgggtcagttcccgctccaccagcttgcccggctgcggaatggtggtctgctccgcaatagccacccgctttcctcccttcaccagccgtccgatatacccttccgcgctgtggtggggcaccccgcacatgggaataccgtggcgcttggtcagcgtcaggcccaaaatggcggaggcctccttggcgtcctcaaaaaacatttcgtaaaaatcccccagccggaaaaacagcagcacgtcttccggcaagcccttcttcatgcgaaggtactgatccatcatcggggttgaggcaggtccggaactactcataaataacggtgaaagagtaatccgattgcggcttcaaggcaaggttggaatcttgttagaaccggggctccactccccttttccaaggaaaagccagggaagaatcatccaaagccccgcaaagaaaatgcgttgcctctgccattatcgcgtcttttctcttcctctccggaaacaggccctcatgcggaagaacccggccatgcagaccgccatctttttgcgaagcgcggcaaacaacaggccatttattccagaaaagaaaaaaccgtgccgcaaccggatgcggcacggtgtgaagtcagattggaggaattaatattccaccacgggggcatccttccacagggtgtccattccgtagaattcgcgcgtttcctgccccatgatgtgaaccatcacgtcaatgtagtccactacggaccacaatgccacaggcgtatcttccacataagtggggagggctcccgccttttcccggacggcttcttccagctcccggatgacggcgcgcagatgggggacggacaaccccgtgcacactaccatgaaatccgtcagggaagacatgccccgcaagtcgtacacccgcacattttcggccttggcgtcatccgcggcgcgggcgcacatcctggccagttccatcgcatcgttggctaccatattcgattcgtttctattgaattatttcttttctccgccgtccttgccgaactcatcaacgggattgtaggagaaggggtcccgttccgcctgttccagttcctcttccatcttccgttcttcagcgccgtccgcgcgggtctcttcagcttctttcttctcgttatggccggaatcatccttcccgggctgttcctccacttcggaaggcatggggggcggagtcaccctggcgggagggtttttcatttccccgtattccagaatatccatgacctgggaaccttccagcgtttcaaactccatcagggcctccgtcagaatgtccagcttgtcccggttttccgtcaggatggccatggcgcgttcataagcgctgtccaccaggaagcggacttccgagtcaatcagctccgccgtggattcggaataattgcgggaacgcgtccccaggtcgcgggcaatataaacttctccctggtgttctccgtactcaatcagccccagtttttcgctcatgccgaattcgcacaccatgcgccgcgccaggttggtggcgctcctgatgtctccggtagcaccgctggtcacatcaccaaaaacgatttgttcggcgcagcgcccgcccatcgccacgacgagctggtccagcatttcggaccggagctggtgcatcttgtcgtcggaaggaagccacatggtcatgccgagggccccgccgcggggaacaatggtcacccggtgcagcggctcgctgtgcggtgttttcaacaggcagatggcatgccccgcctcatgcacggcagtaatgcggcgcccccgttcgttaatcgccaggctgcggcgttcacgcccccagctgaccttgtcgcgggcttcttccaattcggcctccgtaatctccttcagccccttgcgggcggccagcagggcggcttcattgaccaggttggccagctgggcaccggaaaagccggacgtgccgcgggcaatccgctcaaagctgactccgggcgccatcttcacttttctggcatgcacctgcaggatctgttcgcgcccccggacgtccggcaggttcaccaccacctgccggtcgaagcggccgggacgcagcagggccgggtccagaatgtccgcacggttggtggcggcaatcacgattacattggagttgttttcaaaaccgtccatctccaccagcagggcgttcagcgtttgttcccgctcgtcattgccgccgcccatgccgtaaccgcgctggcggcccacggcgtcaatttcatcaatgaaaatcaggctgggcgccgtccttttggcctgttcaaacatatcgcggacacggcttgcccccacccccacgaacatttccacaaaatccgagccgctgatggaatagaaggaagcgttggactccccggcaatggcacgcgccagcagagtcttgcccgtaccgggcgccccgaccatcagcacgccgcggggaatggtggcgcccagatcgcggaatttttccggattgcgcaggaactccaccagttcccacacttcctccttggcttcgctgataccggccacatccttgaacgtcaccttgttcttgtccggggagatgaggcgcgcccggcttttgccgaagctcatggccccccgggccccgccgctctgcgcgcggaacatgaagaacagaatcaccagaatgagcacgatgggcagcagattcagcagaatgccgccccaggaaccggattcacgcttgaacttcgtatccggccccagcagctgcttgacgcggtctccctggaactccagggtaaaaggcacttccacacgttcaaaacgctgtttgtccacggaggcgtctcccgtagccgcgggccagatgcgggtgacaatctgtccgaccagcacgttctggttgccgtcttccgccaggatgatgccgtcctttcctccggcgatgcggccttccagggccagacggttgaattcaggcacggaaagcttctgagctccctcaggaatgagggaaacattctttccctcttccgtccggtacgggctctccaccaccctgtagccggaaagttcattcagcaaaggcttgtcgcggtccggaagggacatggaataagtcagcgcaaagggggtcatttccaccttcggctgaatttccttcctgtacaccagcgcgtgaataacgccttcggaaccgttctcgctcagcaccacttccacgggggccttggggtcgttcagcaccacgcgccccgctttatactgggcttcaaaggattccagattttccttgcgggggcccaacccgaaagattcaggggtgaaaaagccaaacgcaaggacgcctacaatgagaagtaccatgacccacacgccccagttgggggattcgggcctgccggagccgggaaatttgggaggacggggaggactgggtggcattctgtcagacataatgtggttagcacacagaagttaatgaatagggcggcatgatacgcgagtccttgtaaaataaaacttttttccgagacatgccatacagccgccgcaggacgggcccgcaccgttccgggccggggctcttcccggcaataaggccttaaccggcgcaggcctcattcccgctttctttttctgcgccgcccctcatggttcgcgctttctccgttcatgcgctgccggagacgccgcttccactggggcatcctttcttccgccggggccgcatgggaaccggcatcttcccggctcttttcctgccaggccccctcctcctgcgcgttcagccgctcccgccgcctctgctcctggatttccgccaattttctggcgcggcggatttccacccgcttgctcacctccccgtgggcggaggtcacgcgccaggggccgatgcggcggggataggtaatgggtgcgcaaaccagttccgcatccagaaaacgcatggaccccaccagcaggttcttgacattcgccagcaggccgccgtccgtccagacgccgcccatgcccatttccagcagaaaagccagatgcagcgtctccgctcccgaggcctgaatggaaaaatccctcagggaaatgccctccgccggctcctcgtccggagcggccacggaagcggcccggaggaggaacatcgtatcccggaccttgcggctcagggcgcagaccagttcccccaccttgggccgggcgtcaaaacggtaatccttcacttccaccagccacagatcccggcgttccggatgatacagcagaaaatccatttccttgcatcccccgcagaaattctgcgcctgccgggcataataatccgaacattcaatgcggcacaccacgtagccttcatcgatccagaaacggtggacgccctccacgtaataagcttttgacggcttatgactcataactcagcttcaaatacctgtccgcctgttcgatttccgcttcaagagactcgataggtcccacgtcctccagggattccccccaggacacccttaccccggaacgttccccccgcggcacgctcatcccgaaaaactttctctgcaccatggcattgcggggttcggaaagctgaatcatcagctcccgcagcaggaacaggctgtgggaggacaaaataacctgtacccccgtcttggcaagccccgtcagggttttcaccagcacgggcaggtgggaggcgttcagattcatttccggttcatcccaaaacaggacggaaccttttttcacggaaccgttccggatcaggtagctcagcgttcccagccttttgaatccttccgccaccaggctcatttctatcggctgctgtccgggacgctgcaaaaagaaccgcccgtcacgcttcaccaccttccccccgatgattttttccagcctggcaaccacgcgcccggcatccgtactgatgggctccgcttccgcctccatatccagataacggcagaggtcccaactgccaccgtccagaaattcggggaatctgcttcccacctgcacaaaactcggataaatggtcagcacctcccgcgccgccaggaacaccaccggcacgttcagaaaacgccggggcatttcccggatgctcagcccctcctcttcatgccccgcctggaaatcaaacaccaggttccccatgccctccggcacgccgtccccttccatggaggcctccacgcgcgcatgggcgtttccccggttccgggccgtcagcccggccagcccgcgggacgcgaacacccgcatcaggtcttttctgagccgctgctcctccgcccatttttccggcagggattttctccccccgtcagcgctccacttggccacggtatagcataatttcagcaaatggcttttgccggaatcattgcctcccaccaccacattgattcccggaacaaactcaaaatgctctctcccgggaaacaccgtcacgccgctcaccagtaggtcatgtatcataccgttcccaatgtagcacagaagcgcaggccgtaaatgacaaaagccgccagctgtcggccaccggggagcctgccggaaaaacaccggaaacaacggggaaaacgcatacggccgcagcaccgccccatcccccgcaggttccggacatacccggaaggcggcgcattttaggcttcccattgccgggcgccttattaaagtaatccgtatgagcgcacaatggaccaccgccagggaatacacggacatcaagtatgaaacaacggacaacggcagcatcgcaaaaatcacgatcaaccgcccccacgtccgcaatgcgttccgtcccctgaccgtgcatgaaatgctcaacgccctgaacgccgctcatgaagaccccagggtgggcgtggtcatcctgaccggagaaggcccggacgctttctgctccggaggcgaccagaaagtgcgcggaaatgccggttatatcggtgaagacggcgtgccgcgcctgaacattctggacgtgcagcgcaccatccgcaccatgcccaagcccgtcgtcgccatggtggccggatacgccatcggcggaggtcacgtcctccacgtcgtctgtgacctcaccattgccgcggacaacgccaaattcggacagacagggcccaaagtgggctcttttgacggaggcctcggctcctcctacctggcgcgcatcgtgggccagaaaaaagcgcgggaaatctggtacctgtgcaggcagtacgatgcccggcaggcgctggacatgggcctggtcaataccgtggttcccctggaggacctggaggaggaaacgctctcctggtgccgccagatgctccgccacagccctctggccctgcgctgcctgaaggcatccctgaacgccgactgcgacgggcagatgggcctgctggacctggccggcaacgccaccctgctctattatatgagcgaggaagcgaaggaaggcaaaaacgccttcgttgaaaaacgcgctccggatttttccaaattccccagacttccgtaacctccccctcctccgcaccatggcacccagctccgacaatgaaggcgccccccggaacggcaccgccggcagggaatccctgcgcgacctgccggaacatgaaaacatcgtggagcatttctacgatccggaagatcagggctcccgggaaaaacccgtccgtgaaaaaacgcctttctccctgataggcaatctcatcttcctgctgaccatagccattctggccgctattgcctggctggtttactcctcctggtgcccgcagaaaacggacgacctgcccggcttccgccaaagggaaaacgccccggatatccccagaatcctgaaacaggccatcaacagggacgcctccgtctcgttctcggaagaagacatcaaccgctacctggcttcctccatccatccccagcagcacggcgccctggccatcttcgccaccaacccggcggctggcatccgtctgcacggcggcaaggaacggccggacggaaccatcggggaaggatacatggaaatcatcatcgaacgctatacgggcatcgactcccgccagacgatttccctgttcctgacgcccttccaatccctggacccgcacaattacatggcggtgcagacccgcttcgaattctacaatgacgaaacgctgccgggaggaatccacgtggggggcaccatcggcagcctttccgttccccagggttacatgatttttctcctgcccgcgtttgaaaacctgctccaggcctacctgccgcttatccacatgattgaagaaagcggcatgggcatccatatcagtgaaggcaggctgaacctgacgcctccgcaaaagcgcacgctgtagcggaagaccgcagggccttccgcaatcaccggatgccctgccgggcaatgcccccttccggccccggcattcaatttttctccagatccctgaccatcaaagtcatatactcctcaggccaggaatgtgtaatctgacccgcatcattgaaaaccgccaccaggcggatggaatccctcccatctgaaagcaccagcacggtttcatccttttcaaaatcataacggggcttgcccaatttgaatgccgcactcctgcggtccgtcctcagccacgcgcgagcctgctccatcgtcaggccacgcagcgcccgggcatccctgaaaacgcgccgcgccgcattcatcgccgcagggctggaaaccaccatgccatcccggaacgggcgggttccccacatgcggtcaatatcccggtccagcgcgccgcccatccccccggaaaggaaaaacacggctgcgggccaagccaggaaaatacccgcagcccatattgccagccgtttgcggcttctggaaagagccgctattccctgggctattttcccccatttttctaccagttcccggtccgcatgcccgaacaggaaattcacctgcctgcgttctatgccgccccgcagttcagccaccgtctttcccttttcgggcgccagatcctccagcgtggggcttccttccacgaagtggcggaaaatcctgggccacagcacgggaataaccgcaaaccggattgcaagcagaaccaggctgcccaccaggcaaccgcttatcaacagaatgtcaaacgaacggctgaaaaaatagtccggattccacatccagataaaaggagccgccagatacatccccagggaaaacaggcaccatgaccagactatggcggaaaaacggctggccgccacaaccacccccagcaggaacaaaaaggcccccagggcaattccccacggaaacgccccgtaaatggcggccggaaaagccagaatcatcaatgccgtacccgcgggctgccgaactttttgcatatccggaacatagcacaagcccttgaaagcatcaagaaaggaagcccccgcagtcacacagggactgttcatcctcccccgccttacttcaaccagccatattccatgatgagggccgcttccacctccgcattcttggaagcttcattatccaggtcagcatacattttcctgatatccttcctctgttccagatattcatctccggaaacggataatctggactccttgaacgcgatttccttcatcagcaccccctgccagagctcaaacctcctgcggctctccagcaacgcggctatcttgatgcgccgccgctgcagttccatcaccacttcgcgctgcagcagttcgtggctttctttggccgacttatactggaaccaggatgtcaggcgcgtatccagttcttcccgcaggctcatgttcaccttcatatcgcccgctcccgcaaaaaaaccgccgtacgtcccgcccgtgctggaaaacagggttgggctgtaaaaattaatatccacggacgggaagaacttcagtttggcattcagcacctggaggcgggaagcttccagctccatggccaccatcgtcaccaccagcagatccagctgccgggacgccgccctgtacctgccccagtccagcctgggcatcgtttcagggttcaccagccaccgggcgtccatattccccagcaacacggcaaacccctgggaaatctcattcaaattccgctcccgttccaggtccagcttctttttctggacgccatcatcgtcataaggcagggagctcagctggttattgtagctgatctgcgcgttccggtaggaaagcacctgctggtacaatctggccaccagctccctttttttcatctccagcgtcttttccgccgtataaacagccgccttggcggaataataatcaaacgggatctgggtgagggacggcatgttgaacagaatgttcgtattgtattccacatcgctggccgtcaccttggccaggtcgctcaattccttggtcagcatccagtccagattgactccggggataatctgggtaaaaacattaacgacggaacgtttcgtcgtcttgagggactgctccgattttttcaagtcaatgttccgctccatcatcatcgccagggcctggtgccatgagatttccttccgcggcagctgccgccaatcgggaacggcatccatcctggccatcaattcccccgcctttttttccatgtgcctgtccacggagcaggaggcgcataccgccgcacagaggcagaagcacaacgcagccctcagccatgccctttcaaacagggaaaacaggaaagaacggacaacaggaggaaacgggaacatacaggccccttgttacatagcttctgcccctgaaaagtcaagcatcaacacggctggcggggaaaaaaggaaaaagaagtcctggagcgcaggaaattcggtttttcctttccccgtgtaaaaaatacctccctcctgattcctatcttgacaaatcatgtgtgatatcacagtttatcggaaaattattatccttttatgacgcgtccttttcttacctctttgtctgcggcctgctgctccctcggcattcttacgctggcccaatgcggcggaagcagttccgatgccgagggcctggcgccttccaccatcggcagcaaggtattaaacatgatggtaacaggcattacggatgccgccatagatcttcccgatattcttaacataaccactggtgacaacggggcgttcatcgcccagacgcaaggggaagacatagacatgtggaacggggcaggcatttattcctacaccaaaaccgggaaaaacaccgcggagctgagtctgtcttacaacagaaacgacggttcatcgtcagaacccaatacccttgtgagcaccatcaggattccccagttaacctttgagaacgcctcccatgcttcttccggggaaggtggagccagcatttcctacatgaaagcggaagataggcaacccatccccatcgacggcatcaccatcagcgtcaacatcatatcccagtcataaataaattctttcctttatccatcaaaccatgaattcccgcctttacattcccgctttaattactctcgggcttgggatcctctccggctgcggcggatccagttccagcgaacaggcctatcttcccatcggccttcagcgcacgttggacattactcttccgaacggtcagccttacgtcttctccttcatcatcgcctcagaaagtaccgctactatctacaccggaaccagtccggccgcctcaacggcatccattcatgttgtcaactacaagccttcctccgattctgcggaacaaataggcttttactggtcgtccaatgacggggaaacaaccaacaatctgaacgcccttgtcgtcctgtataatcccgacaacatttccaaaggcctcggttcagccacttgcagtgtcaaagacgccgaatatccctcaacggtaacccagcaggataactgccaagctgtcatcagggacttcataacacccagttccagttcccaataggccccttttttcgcacctcccttcccgctcccattgtgggaagggatttttttaccctgatctctcctgccggaataaaatccaccttttccccaaaccggcaaaggcgggccggacggaacgcaaacaaaaccgggagcagccccgaagctccatcacttacttgagcactttccctatggggcggcaggcggaaaaggcgaccggaatggaggaaagcagaacacaccccgccagggaaattcccagcagccacaaatcctgccgtatatcggcataagtcaggacggagtttcccagcttaaagaattcccccaatacgattttctgggttttcatgaacgcccagacggctcccgaaaaggaaacgccaatcagaaacgcgttttccacgataaacgccataatcagcagtacagggcgcaccccgaagctcttcatcagcgtatagacatattcattctgacggaattccatggatgccagggctgtaagcagaatgccgacgatcaccgcaatgccgagggaaaaacccgtcctgcactccgtctggttgcccatcagcacttccagcctgtcaagcagccctacgtgagtctgaaccatggtcatactgccgtcataacgcaccatgttgttcagcacttcttctatgctccgaatgcgggccgccgtcatttcatgcacccggatgatgtagcggcaattttccacgggaacctcctgcccggaactaaaggttccttccggggccaaaatgactccggaaggatacagcctgcccagcaaatgcccctccggcagaggggaggcattcagggaaaaatcaaaatccgctatggtgaccgtacaaggccccgcctgcaacgggctccgggagggattgtacagaaggacggtagccacgtcctccaatccgagcgcggaaagaaaagaacaggactccatgttgtattccaggatggggaatactgtcttgcccacgcgcgccacgcccgcgcgggcatcattcagcaccaggacgtcgcagccatacagggaaggcagttcatgctgcagcaaatttttcttggaagggtccccgtcgcgcacggtatcaaaaacaataatcaggtccgccccgttcttcctgatttcatcatgcagcattttggcggagaggacataattggcgagaaaagagagcgcacacagggaaaggaagaaggccaccagaatccgtgaaagggggctggccgggcgttccttccaacggtggagagtatctttaaagagatacagacaggttaaaatcaatgatttcatgggtcaggtcaaacagccgggaatcatgcgtgctcaaaatgcaaattttgtcagcagggtactccctgatcaaatttttaatgatttccgtattgccgtcatccaggccggaggtaggttcatccagcagcagcacatcggaatccttcatcatcgtgcgggcaagagccgcccgctgggcctggccgccggacaagctccccgcctttttatgcctcagagattccaggcccaggcgggcaatcaaatcatccgccctccgcgtccactgctttttaggcagcatggccatttccgcacacaattgaaggtttctctccactgtagccaggggaaggagattgagcccctggaacatgtaactcacctccttgcgccggtagagggaatccgcctgaaccttacggcggggggtaatcacgcgcccgcgctgcgggctcagataacccgccagaatttttaacagagtcgttttcccgcatccggaataccccttcaaaatggtgattccggaagtgaacaccctgttgtaattttcaaaaatccactgcttgcctgaataactgaaacagactgattcgcacagcaatttcatttttttcgaacaatcaattccgtttccccattcaccaccagttccaggtccggatgcactttttcaagaagttcctgccaggacgaacatttttttccctccggcagggaagccagcctcaccttgttgagatgaaacacttctccctgcggcatgtaataaagacgggccgtgcagttggaacccagcatcgaatgggctcgtgcatgctcctgacggggcaaacggaaaaaatacgccagcaattccccgccgccggaaacattcttctccacccgtttgaaggcaaaaacccccttcagggcggaaccgtcgcccagagggacggacagggaaagggattccggcggcagattcgtcaaatcagggtctgatatggaaatggtcagataataagaggagtcatcgcacacggtcgcaatcggggacgcggcgtccatgtacagggctacgctgttatccggcggaatggaaaactggtactgcagctttccgtcaaaaggcattctgaggatatatttttcctccttcttgcgaaaatccagacgcggcttgtcctccaccagggacaactcccttttggaaagctcaatcttgtctttcaaagcccggatggccctttccccgccttccgcctgcttgctggcatattgccgttcctccctcgacagggaagagtagaattctatctcttcaagctgtttttccagctttgacaactcttcctccttggcgatgcggtccttcaggattttgacctccagctccttgcgctccagctcaatttcatcttcattgaccgttgcaataatggtatccttctgaacgcgcccgtccgcgggaatccagttgctgacaactccatctgccggcatgacaaaggagcgcagcctttccgggacgatcttggcgcggaaagtcttgataaaacaggcatctttcgaggccgtcatatcagcccccccgccggccgattccgcattccagacacaaagagccagccccgagcacagccagatgccccaaagacatttctttgcccttccgaccataatttcaaacaggcctgccccccccgtttcacggcagcaaacccccgtcataaatgatcagaactcaggataccgtgtaactcaccgttccttccgtagcggtccagtcctgcgcttcttcaacgccttcatcatttaaaacgggaacctggtaagtgatggaaccggtgaacgtcccgccgcagctctcacgttcattggaggtgttgaaggaaatattagcatctataaaggccttgtccctgtttgtcacaacaatcggccccggagccgtccactgtccggaagtaatcgtgaagttccccctcagaatagcggatgatcccgtcctgcggtacactacggaagcaatattcataggagcgctgtcactactgctgtccgcattaatgcttacctggggaaggtccgaaccattgcccgtcaatttgacgataacattccacggcccaaccccgccttccgtggaaagagaagcgctcaagtccagcatggtgccggaaggaaggcattccccgtcaccgctactgccgctgcctccgcaggaaaagagtccaagggacaaggctaccgcggaaagggaagataatacgcacctgttcgtcaatcgggaaaacataaagaaaaagattttcttcaaggatagtgattccgtccggcgcgtcaacacataaataaaagaatatttggaggggccttccgttttttttgcgggatgcaccggggcttacggcccgctgccattccccggacgtgcacgccggattttccgctttgcggcggaaaatccagacgccaatccccgcaggccgcaaacgtcatccggccttttccagcctgcgcttgaggacgcggcccgtgaccagcaggggggcagcccccatcaggaacaggaacagggaatccttccatggggtgggaaccgttccgtcatccgcgctgtatccggaatcccccggggacaggccggagcctccccagggcagaggctggcggcgggccagaaaaatttccggcctgtccagggcatcccggctgacacgctggatttcggcagattcatccagcatcacaacgcggtcattgacatagaaggatttaacggacggacggtccttacccaggagttccaattccgcaatagtccgcctgtagcttttttccgaaccgccaagggctgccctcctcacctgccggacagcggctttggcctgttccggcccctccgctccaatagcggcaatgtggagcagcgccatcttgagcagcttgaattcttcaaattccctgtcgtccagatgagggcgttccttcaggtcgtccactttctcctggatggtttcacgctccctctcccatacatttttggacgcctggtccaccaccatcgtttcaaaagagtagcgtaaagggcagaattccgccaccagcggcacacgccccggcttaagacgcccgtgttcatccgtacggtgggcggaccatgggatgaactggttcatttcatcaaagcggacaatggctccggccatcaatatctggggaatcagaagcagaggcaccatgttaagcgccgccctctccgtcctggcgaagacggaaaccagcagggacaggctcacgccgacaaaggccgtcagggtcatcgtccccaggtaaatcaggaacatttcatggatttccagaatggagttccccacccaaagaaacagggcggactgcacggcggaaagtcccgtcaacaccagcgcctttgccagcacataaccggtcacaaataccttggcattgctctccctcttgagcagggcacggtccttgagcacttcgctggccgccccggtcaggccgaagaacatggccacaatggtcgccaggaacaggtaggaagggatgtggagggccgtggcaaacgtatattccgggctggaagaggcgcgcagggtcatggaaatcagcagggccagcaccggcccttccagcagcatggtgtacagccccatacggctccgcacgcgccccaggaaggtgcgcacggcccagatgcggaaaagccgccagagctgtatgacgctgcgcctgggggcagggggaaatcccagcgtgccttcatacagcgttctgggggcgcccccttcatgatgatgccccatcacgttgcggaaccggtagccttcaaagcgctcctgccacaggcgggggtgctgccgcctgcggcggtcgtgccaggagaggggggcttccagcacctcaaacacgtagtccgcgcctccggccgtccgcgcctcctcggagacgtcaatagccatgtccgcagccgccttccggaaataccgcatcatgcccggcacgtccccccagtaagccatctggccgccgtggtccagcaccagcactttgtggaactggttcagaatagccgtgctgggccggtgcatggtggcgattaccattttgtcgcggctcatgttctgcatggtctgcatgaccagcttggcatctgacgtggacaggccgctgataggttcgtccagcaggaaaacatcggcaatgcccgccaggtcaagccccaggttcaggcgtgtgcgctccccgtcggaaatggtgcgggcgttcatctcacccacgcggcgggaggcgatgtgcgtcaggcccagaaatttcaaaatagcgttcacgcgcctgacgcgttccgaccggctcagccgcggacggcgtatcatggtggcctgagagatgtgttcggaaacgctcatggccgcatccagaatatcttcccggggaatgaaggcgatgtagggccggataagatccggggcgctgtacagaagctggttgttgtaacggatgcagccccgggtgggcggcagctggccggccaacatggagagcagcgtgcttttcccggatccgctgggccccaggatgcacaccatttccccgcgtttcacggtcaggtcaatgttgtccagcacgcgcccggagcgcaggaattccttggtcactccttccacgctgagggttctgatcgcatggtattcttcatccagcaccccggcggaaaaacggcagcgcagcgcgtggtaggcattcaggtgcaccacgtccccatccctcagggaaacccttccccgaacaggccggccattgagcagcagaggcatggaggcctccaccacttccagccagccggaattggtggcgctggaaaaagaaacctccagcaccgctccgggggccagaccgggagtcagcagcatgtctcccttgcgcgccttttccggcaggttggtcacccgcagtttgcggtttccgggatccaggcggaaacggcgcccgatgtccgacatggaattctgcacctctcccatggagaaaggcccttccccgtccagcgtgaaggaggagtaataggccatgcgcacgctttcaccggggtacagccgtctcccgtcaaccgagaattccacttccggcctcagcacctccacctcgcacgccagccccatgttcacgcgcacctcgctggcgcgggaacgcacccggctgatttgcagggagccgccgtccagggaaatatagcatacttcctgcttgcctgaacgcttgcagtccagaaaaaacgcgaagtcttcaaaactcagcggaccggacggcagcagcaccacctgcccgttggtcagcggcatcaccccgccgggctgcaaatggcgcccgcgcaccacaatggggcgggtgccgtcattcaccaccagcaccaggcgggaacaccggatcaggcggaaggaaatgcccttgtcctgctccggaagggatacctccgcaccgatgccggaggaaaaaccgacgctgtacgccggttcctgggcttccacgtccggcgtcatcagcagctgcctcaggtggtttgccgtgcccggcagttccagaccgtacgtcacctggtcaaacagctcccctgtcatgcgggaatctcccgtattgatcagcagggaaagcacttccagagctatcgccatgcgttccgtctcatccctgccggaagctgcggaggccaggacatccgcaaccgtcaggctggccctcatggaccgctcaaaacggttggaaagccagcggtgctccacttccgggaaagtatagcgcagaatatccagggcggcgtccgcatcacgggcgctcaaatggcggcgtccgcttaaaatagtggcgaacaagtccaccagcgttccggcatgcaccttcatggagccgtcgtcacggcgcagccacggcacgtaggcgcccagcgccctgaccagattcagcctccagtgaatcagcttggaaggaatgtcaaaaaaccattggatcatgcccggaaacgcgttgccggaacagtagtacagggattcccgccccatctcaagcgcaaccggaatttcacggagaaatgacaatattttctacagctttatcttgcaataggtccagaggaagtatagttctgtccaatgttcatgctttccgcgtgaaagctagccaaatacatcaacattatcacaacatggatattttagtttctactctttgtgacttcgccgccgactaccagggcaagctctgcattcagggcggctttgactccctggtcgcccgccagttcccggtcgtgcatcccgtctgcgccgttgccctgcgcatctgcctcactcctgaagacgaaggtacgcacgaactgggcctgagcatcgttgatgccgacggcacgccgctggacaaggaacgcatgcccatcaagatcaatttcccggttcccgctttcccggaaggagcctctttcttcacccgcaacctgatcatgaacttccagggcctgcgttttgaaaaaccgggcaactactccatcgacctgacggttgacggcgaactcgcctctcgcgtacccttccgcgtagtgcaggtgcaggaagaagccgcccaggcctaagaaaccatcccctcttccatcaaaccgcctcccgttcatccggcaggcggttttttattggagcggccgtccgcccggaagtgcggaacaggccggccccggttccatgcacctgaaaacctctgcgcctggccccggcctaaaaaagggagaccggctttttgcgtcctccttccccctttttcattgcggttccgcaccggattgaccatgatacgggctgctccaacccgccatgcacaccgcacgcctccaatacgacaggattatcattacgggcgcatcatccggcttcggggaagcgtttgccggaacgctggccccccatacggcggaattggtgctcatcgcccggaatgaagccgccctgcgccagcttgccgccgccctggaaaaacgccattcaggccttcacgcctccgtccttccctgcgacctggcggacgaagcctccctgaatatgctcatttcccgcctggacagccttcctccgggaagaacccttctgattaacaacgccggtgccggtgattacggagatttctcggacggccgctgggaaaaaattcgttttctgctgcgcctgaacgtggaaagcctcacccgcctgtgccatgcgctggtcccctccatgaagaggaacggaggagatatcatcaacctcagctccctaggagccctcctgcccattccggattttgccgtttatgcggccaccaaggcttatgtttccagcctgtcggaagcgctgcggctggaactgcgcgaacacggcatacgcgtgctggtcgtctgcccgggcccggtttccacgggtttcggaaaagcggcgcgccgacccggctttaccggaaacatgatgccggggcgcaacgcttttgacacgtccgttaaaaccgtcgtgaaagacagcctccgtgccctggcccgcggacgcgcccgggtctttcccggcatgaaaatacgactggccgccatgctgctggccgccgcccctctggggctgatacgccttttcatgggcaggcgcccccggaaagtcctgccggcatccaatgattctccttcttcagcatcatgaaagcgcaccgccgcagaataccccgcctcacctggttcaagctcgcagtctgcatctgcctggcagccatggcagcctccctgttcacgccgtaccccgcccagatcatacgcgccctgaaaggggcgccggaacaggcgccgccggattccggaacctgtccgccccagaaatccccccccgcggaacaacccgggcaggaagaacagccaataaccgctgcaccatccgcctccggaaaggaacccggggatgaacggctgtacactccatggacgccggagcgcacaatcgccctccccccggtgcagtaccccccatttccccccgtgcttcccacaaggcctgcggaaggggccatgacccatatttatgaactggcccgcggactgaacctgaaaacgcaggttaatttccagcccggcaccctggcctccagggacagggaaaccaaaagcaattaccagatgaccctttccctgaacgtcaaacagcccaaagcattgacgaaaaaggaagatatgctgaagctcaatccgaaactggaacccatgcttcccggcctgtccaccctgttcaggcatgcgcgcgtctccccttactacgggcagatttacgtccgcaaacagacggaaatccgtaaaaacctggcctccctgctcaaacttctggaccgccataattattacgatacggagacgattctggaaaccacctatccggacacgggaaggaagcttctctggctgcaaagtgaaatggatgttgtttccgacggctcggacggggaccggctggccgccatgccggataaaatcctgaaaagctccttctatcagcccagcacttcttaccgctggaaaaagcgcacagacaagcccaatcccctgctcaaaccctggcagcagaggctggcttcctacaagaagacgctggaaaaagcccccgccgcggaaaaaacggctctgcgccgcaaaatagaccatgcggaacgggtcattgaggaactgaagcggtacagcttcctgatctcggaatacgatccgttcatcgtggttccgctgggagtcgtcaaccagtccactcccttctccccgcagttcggggactatgccgtcgtcatcgtgggagacaagttgtacccggccctggtgggagacgccgggccgcgctacaaaaccggggagggttccctgcgcctgagccgtgaaatcaaccccaaggcgggcccttacagccgccccgtctccgacctgaaggtaagttacctgattttccccggttccgcagagcccgaggccgggcctcccgactatgaaaaaattacggacagatgccgggaacttctcaacgaaataggcggcgtggggaaaggattcaacctccaccagtgggaagacctgctggcgcccaagccaccgcccgccccaaaaccggaaagcggcggcacagcggaaacacctgcaaataagcggaaaaaggaggaagcccccggaaacaagcctgcccctgccccggctccgccggcttccccgcaaactgctccggcttcatcagccgcaaaaagcgccgcataagctacagagcctctttccaggaaaaaagaaaggctttccacatccgtaaataaacgtctccgcgcgcaatcttcaccttcccggaagatggatgccgccgatccgcccgctggagcagttccagcgtgtccagccccagccaggcgggcaggacggtggaaaaacgcagccgcccgttccgcagagattccgcgtaaaacacgccttccttcagccagcgttccgcgcggtccagccatggacggtcatctggggcaggcaaatagcttcttccgcgggcgaggtcttcctcccggtcacgcaggatattcaccaactgcagccccatgccatagtgcctgccccagcgcaaaagctgctcctccggctgcgtgctgaagcccggcccctgggccagcaagcccagcctggtccagaattcccctacgcatccggccaccatgtaagtataatgttccagttgttccgggcatgagacggcagcatggctttcaaaatacatcaaatcccacgcctgtccctccacgatggaggccagcacctgccgcaccagcatccgttcatgcggggaaaggttttccagcagcgccaggcattcggggaaacgggccagcaattccgcctccccccggtgcgtctggattgtggaaagaacgcccagacggccaaaacaggtggcggcaacctcccgggaggcagagccggccaccgtctcccccatcatcctcaaaagcgccaggcgctcccggcaatccatgtccacggcatccgccaccgtatccgtggcacgcgccagcagatagcccacggccacgccggggcgcatttcccggggcaggaagcgcatgctcagataaaaggaccgggagacggccgataaaagatggtcaaggcctttcatgatttctgcaggcccagcctgtgcatcttataatggagtacccgcggggaaatgcccagttcccgggccgcggcggacatattgcccggagaacgtttcaatgcggctacaatcaattcccgttcaaaggaatctaccatggtcggcaaatcggcgggagcctccccgtcacgggaataagggacgtcatggctgggcatctggagggaggcgggaaggttgtaaccgtaaatgcagtcgtcctgcgccgtaatgacggcacgttccatgcagttttccagctcccggacgttgccgggccagtggtaagccatgagcatgttgatggcgggggtggacagccgtttgatatcctttccgtatttcaggttgaacttggaaagaaaatgttccgccagcagcatgacgtcccccttgcgtttggagaggtccggcataacgatggggaaaatgttcaaccggtagtacaagtcttcccggaacttgctcgccgccatcagttcctccagattgcggctggtggcggcgatgaagcgcacgtctgcatgaagctccctgttgcttcccacgcgggaaaaggtcttttcctgaagaaagcgcagcagcttcacctgcatctggaggcttaaatccccgatttcatccagaaacagggtgccgccgtccgccgcctccgcccggccgatgcggcggctggtggccccggtaaaagaacccttttcatgaccgaacagctcactttccagcaggttctccggcatggccgcacaattcagcgtgaccagcggcttatcctttctgccgctcagattcaccacggcgcgcgccaccagttccttccccgtcccggaacttccccgtatcagcaccgtggcatcgctgggcgccacctggcggatctgttcatacacctggagcatagtgctgcaattgccgatcaattcgcctggattagtcgtcaaaagctcccgcagtttttcattttccgcgaccagggcggcacgttcctcatgcgcctggaggctggcagccagagcatccccaacaatattgcctacaatctccagcagtttctgatcccgttccaggtcggtgtcccggtccacggcacggtcaatgctcaacgtgccgatgacctgctgcaaatgaatgatgggaacgcagatgaaggctactctttcaccgcttttgcgcgtgcgggtacggttcaggaacctggaatcccgggaaatatcctcaatcacatggggcctgcccgtttccgccacatgccccgtaatgccttcccccacatggtaatggccgcgtttcatttcctgctcgtccaggccgtgggaggcttcaatcatcaaatcgttcccgcggcggatggtgaacgtgccgcgcagcattttcatgcggcggtaaagcacgtccagaatatgccggagcaaagccgtgccgttgcgttcattgacaatggcggaactgatttctttcagcacgaccatctccaaatccggtgacctgtttatttcattcatgcaatccggggctgggcgaatattaaccgcacgcccccgccataccaactactttttcttccaccgccatgcacccggacaaaaaaacggcacggggaatatggataacatcccagcaattaatgttgatgatattacgaacggggaacaaaagatttttacaaaaatgtaatacacatcccttgtctcgttccgttttacatgcccacgtctccgccggactcccgtttcatcatctccgtgataacctggaacaacgcgttgcggtacagcacgccgtccagccgaccggtattcttccagaccacgggaaaggcgggcagatgggtttgttcaaacagcttcaaggcatccgtcaaatgggtgccggcgtccagcacgggagcccccgtacggaccagggccccggcatcggccggaaccgcccccttccgcacctccatctgccggcggaccgccagaaagtcctccggatagatggccccttcataaattccatccttattcaccacaaaaaccagatctccgggattccgcagcatcagggaggagacatcatccagggaagcatccggggccacctggggcaccacgtgccgcgccaggtcatgcacatggacttgcgccatgggcaggttgacgacggatgccggactgccggccaggctggcggcatacatggaacgcgcgcgaatcagttttcccgtgccataagcgcttacgacaccgatcagcaagggataaatcatctgtccgctcatggaaaactccactaccatcaccagggccgtcaggggggcctgggcagctacggcgaaaaaggacgccatccccaccatcgcatacgccaccgtatggttgccctccattcccagggacgtcagaaccgtactgaagataaaacccaccatgctccccacgtacagggtgggcgtcatggctccgcccaccgtaccgcagccgaacaccaccgccacggcagacaccttcaccagaagcaggacgagcgcctccctcgtgccgtaatcctcatggaccagcccggtaatgagagcctgaccgttgcccaccacttccggataaaaaacggccagaatccccacgaccagcccggcggccgccaaacgcagcggcagaagggactggcggccattcaaatatctggcggccgcatccagcaaactgacccatcccctggccgccacggccgccgccgcccccagggcgatgcaccagagagactgggaaaagacagaaaagctttcaaacggggaactgtacaaaggggagggatcccccagcagatgcagcatcacgaacccagtacaggaggcaatgagcaggggggccagaatatccatgctcacggtgccgatgatgatttcactcacgaacaggcagccggaaaaaggggcatggaacgccgtcgtgaacccggctgccgctccgcagccgaccagcagccggagccgcggaatggatacgtgcagatgctgccccacggtagacgcaatcagggcggaagactggatgataggcccttccttgccgatggccgcgccggaagcgatgctccatgccgcggaaaaaactttcagggcggaggcccggaacttgatcagcccgttcccgatggacatggcctccatgtattccgtagcctgccccggcatccttttcttcaggaacagcagaatgcagccggccaccaggccgcccgccaccggaataaacatgcgccattccggctccaccagggaaaaggttcctacgcgggaatccgaccagatgccggtgagcatccactggatcacttccaccatccactcgaaaaacagagacatgcaggagcccaccatgccgacgagcacggcccatacataagtaacctgcctttcccccaccttccaatgatggaacagttttaaaatccatccgtaccagacggaatccggcggctgggactgggggagtggagaattcatagaaaagaaggcaatactattccattgtgacaaaaaaatacctccggctgttcgatacggaagaaaaaactgcccagccccatgcccctccggagccagagaagattttcaacggatacgcagacggctcttacgggccccccttcggggcctggcccccgcgccggtagtcagaacgtatatttcaaattgacgccgtaatagaaatcatcccccaaccccttttgctttaccacggtcagcgcctggctgtaattggtgaacaattccacagtcaggcgcccggtagcacggaaggtaacgctcagattataatccagagcattggaaccatggtgcaccaccgggcctacataccccccattgtaaccgtagcgcactatggcatccacccgcacgcaatcagctatttcttcatgcatccccgcaaatacggcataataaccgcggaacgtatggttgttatactgccagtacaggtccgcgccgccaaaccagcggtcggaaaaatggtaggtcgttttcaatccgggacgcgggattcccttatctcccggaaaaacaaagctgtgctcataccagggcatgaccgtccagttgcccaattccctgacgtagtccagccggtatttcagctccgcatgattccggtggtccgtggaaacgccgtaccatattttccccacccactctttatactgtatttcaggaacaaacatgcagagagaaccgtcccacaagtccaagccctcgcactcgtacttgctggcccaccccgcctgaaatcgcaaataaacacgctcatccgcaggaccggccagggaaagggggtgggggcatgccgtcttcaggtggtaggactgttcctggcagaccgccgtcgcccaggctccgggacacgccagcatgccggtgcaggccgccagcgacaacagaattacggtattcatcttcatattggtcatggctggaaatttttctgaaacggcatatccggaagcggcgccatccatgcgtacccgcatcccgctttagccgtaaacggatactacgccctcacccggacaaataccttctaaagatgagaccagcatgaaaaaacaatattcagttccaagagccaaaaaaacgaattccccatgaaagattgtgtcagcagtctttgtacttataaccgtgtccatgaaattcattatccccgcactcgccctgtccgcctgccttcccgcagccttctcacaagaacaaatcatcccgaaaccggcggaaatcacattgttcacaggaagtccggcccgtctcacaccggattccctcatcatcacggaaacacaggacaaagctttcctggatcaggcagggcaattgcagcagatgctcagcgcagggacgggactcccccttccccttaaaccggccgggcaagcgtcgaaaaaagccgcctgcattgtcatcaaaaaagacccagccctggccgccaggggagaagaagcctactccatccaatcatccccaagtggaatcatcctttccgcagccgatgccaggggcatcttttacgcggggcaaagcctggtccagatgatgccctccgtcttccacgaccggacggcggataaatccgccgtccggtggaatatttctgaaactccgttccgcataacggactacccgcggttctcctggcgggctctgatgattgatgaagcacgccacttctttggcgagaaaaccattaaacagatcatcgaccaaatggctctgctgaaaatgaacatcctgcactggcacctgacggacgacacaggatggcgcattgaaatcaagaagtatccgcgcctgacctccatcggctccaaacgcagggaatcagaaatcggcacatggaacagcggcaagtcagacggaacgccgcatgaaggcttttatacccaggaacagatcagggatatcgtacaatacgcagcccgccgaaacatcaccatcgttccggaaattgaaatgccgggccatgccagcgccgccgccgtagcataccccttcctgagcctgaaaactcccggggaagtgcccacaacattcatcgtcaatacggccttcgatcccacctcggaaaaaacttattacttcctgtccgatgttttggatgaaatcacggcactcttccccggcagaatcatccacattggcggagatgaggtgcgctatgacaagcaatggaagggggttccgaaaattgaggaattcatgaaaaaaaacggcatgaaaagttatgcggacgtccagatgcatttcaccaaccgcatgtccggcattattgcccaaaaagggcgccgcatgatgggatggaatgaaatttacggacatgacgtcaatggggacggaggaggaaaagccggcgccaaactggatacaaacgccgtcatccagttctggaagggcaacaccagcctggctaaaaacgccatccgggacgggcatgacgttatcaattccctccacacctccacctatttggattacagctacggcagcattcccctgcaaaaggcatacgggttcgaacccgttttccccgggttggagaaacagtaccattccagagtcaagggactgggcgcccaagtatggacggaatggatttccacaccggaacgcctgcactaccaggcattcccccgtgcctgcgcctttgcggaagtcggctggactcccgccggtaaaaaggattttccggatttcaaaaaacgcttgaaagcgtatagcgagcgtatggatctgatggggatcaagtttgcccggaacgtcatcagccaaatagacaaatctgactttttcaatacgcccaggatcggcacatggacgcctgccaccctgacccgggaggaacattcgtttgacgttaccaaactggtcaaagcgtccggcaaacacaccgtcaccctgctgtacgacaaaggcgcccacgccatcgaaatcgaatccgtagccctgtatgaaaattcccgggaagtctcccgggacgcccatgcaggcagaagcggcgcccataaggaaaatatccagtacattctgaatgccccggcccctaggcaaggagcaacctatacggtcaaagcaaacttcaaaggggccggaggccgggattcccacgggacagtgtattttgaaacgccataaaaacaccgcccccgccccataccagaaacagcagggggggcttcacacagagccccctttactccaacaaacggagcacagcatccgcagactcatggttacggacacgagcctttcagtatcattggcctcccaagggcgccggcatgtcttttcatagaggaagacgcccctttccatcaggtggcacgaaattgatactttaacccacagaaaggcttaccctgaaatcagccttgccttaacaaggctccggaggtcgttgcttgcgaacctccggaacctgaacaaccgtgaatcggcggaagatgattttcatccgggaaagccagacggaatttacatgttatcatctaccactttttccacatactggaaaaagatgcttccgtcctccccgctgattccatagtctctgacatcctcaatattcgcattcttgattcgggtaataatatagactttggagtacaaaatcccccattccccatactttttcttatcaaaccagatatggtggttatagtatggttcaaaatagatggtgcctccgtctatcggatcggaaatcgggccggaatatttgacaacaatatggctgattcccttgtaacaccattccctgccgcattgaggatttttggaaagggtggtgctcatttcaatggtggtgtccatgacatcataggacaacctatcctcatcatggtatttgattcctttttgaggcagattgaactgatttttgatgatgactccatcataaatgagacgtccccctttccattccgtcttctgcggcactgtttcccctttcaagagacagattcctgagagagaaaccattattgcacaggcaattttattcattgttattttctactttgttgttgtttcagcaattccttattgaggaattctttcatttcctgaacagttttttcaggaggggtcttcgcatcgtcccgatactgcctccagtcgatgcgcagcttggccatcaggcgcaattcgctgagagaaaaaggaacagtacccggggcattcggcatgaaatcccgggacctgttgccaatataataaatctggctctgctcccaagaacgcttcatggtctcatcgaaggaagctctcacacggtcgtcgcttactctggcttcccactggaggcagtccgccagacaaccaccctcggcccgactcttccgggcctgccgccacagggaaagaatatacctgttctgaagactgcacgcagccggagtaaggtacttgcgcgtatactgcaactcatacagaggcttgcacacagccttttccctctgtcccagagtagctccactcaccctttccggagtggggacaataccggccagagcaccggatacgtaataaggcagttcctcaggcattcgaatttcccacggtattttttcattcacaaacacgccgtttaaaatggtattaaaggaaccgttccggcaaatacggaacaggtaaatcccccctttcctgctcatgaaccttttataaaccccggaccccgcaaatctggaaacgcgtgtgcgcgcctccaccgggtaggaataccactgctccatggatgcagcaagttccttcccccaattattctgttctcctatcgcaagatccccctcaatattgaactggaacacaaggggagcggtggaagggtgccttctggcttccaccacgtaatcccgcctggattcattggtgagataaccgttgggattgtaaaaatacagggctatttcatggacaccttccggcacctctacggctacccatatatcgggtccgtccacaaagcccggatacacttctccgtggtcatcccactccgcctctgtccgcacggaatccgtagggtcgaaaagaacgttgcggttatcattttccttgatgctgtgcacccaccagcgcaaagcgtcccctttcttgcggttgagccccatcagcccctgaatccagtagggagacaaggcccccttgtatccgggatgtccgggaacggaagaaagagtacggaacttaataggcttggctttgaattcggaattgctcatgggggcattcgtggcgcacagcgtggcacgcgtgtgcccgtacttcccgcaccagtccccttttgtagtccagtcctccccccggaacacaatattcttccccgcatgcgcatcggaccccagcctttccaaccttctgagcaccacagaaggctcctccatctgcgccggacgagggaacgggacttcattgtccatctgttccctgtccagtttataagccagagtcccctttttcagacgaacaaagccccgtccgtatgtcgccgcccaaacactcccgtcctgaagcgccagcaaggaaggaacatccacgttttccagccccttccttattctctgattcaccgtcattttttcagcatccagaacatccactccctgcatccggtagccgatgaaaatttcctttccctgctggataatggaagaaataaaatcttcagacaacattctggaattcgactcccccggcaccgcagtcttccgtgcggcagaaccatacagatggttgtttttctgggcataatcacgccctctcatataacgccaagaactaatgccgttactgtacgccaagcctgagcaggtacctaccaacacctggcccttatccgtacaagtcaaaacattgcagatattggaaggcaaaccatcaccatacggctggtacggctgacgggcgaattgcctgttatcccagtaccagggagcctgaacatttttccactgcatatactttgactggtgcgaagagcaggataccccgccgcaagcataggccagccacaaattccccctggtatcaaaacctgcggaagccgcctggtcttccaccaggccggtggacctgtccagcgtcttccatgaatcgcctgcaggatcgtaaatggatacgcctccggatgtggcgacggccacctccccggaaacgggagaaatggccaaagcataaacatgctctccattcagggcattgctgcggtcatacatcttccattcccttccgttaaaaacggctacgccgctgtcatccgtgcccgcccagatgcgcccctgcctgtcctccgcgatacaggtgaaattctttcctttggggaaaccggaataataatccatattaagccacgatttttcatatgtccggtccccaatctgaaggcggtaaatgctttctttttctcctacagcccagatggagccgtcgccagctaccagcgtgccgcgaataaaacggaccggacattccggaagttgctccggtatctggacggttacaacctttcctgccgcccacgcccccaacaaaaggaaaatcaacacaaatgtccctacgaagtgtttgaatttaatcaacataaccaactatctcctgattattacaggataatattatcggtttttatcactgtcaaccccattttcaatttattgtcaagtttatccaaataaaatacggcataatccgtttagaattatacacataaaccatttaatatatgttagttatattaaaaacatcaattccaagaaaatcctcactaatacttttttatgcttggatgggaaaatacagggaacaggcctgatagcaacgtccggcattccgttttttcaacatgttttccccggttattctctgattcaaatttcaaacctaccatgcgtttccccatataaagttatatttaccggccttttttgaggcaggagaataaacacagctcaagatccgaaggagaagccatctactcttccgaagcggcaataggaggcaatatggacgttcccggaggagggcttcccgatgatggccaaagaaaaagaacgtgttgtcctcaccaacacgaacaattcttccggacctgattccagcaaccagttccggcatagtcacgcagcacccttccgaccatgaatgaggtattgcttcataaagcgggactgacggtcaactgtatattaaagccaccaaaggaaaggagggaggaaccagtccgacaggcggaaaagaagaaagcgaagacaaaaaagatggaataaagcccccggttttctccctagatggcctatccgggcgattataatagcggtctgcaggtttctgttgagccccaagccgggggtatgaaacactgcctccctaaaagatacggccaaattcacgacagatagaattatgccgtcccgtacgttccttcctcatacccaggtgccaattattacttctagataaacggaaaaaacgaacctccctgacctatccaacccctccggattatttctggagaggaaggtgttccgttccacaacaaagaaaaggaacatatcattctgcatccggcccatagcagaacagcctttccgccccggattacctccctggggctgttgaataccctgctgaaatatcgaaacgtatcaaataaacacttattaaagctccgcagccgtcaggtccacgcacaaaccttgacaactgcggagctgcgcttacacacacttattcatccaacaaaaatcgctcagcagagcttcttccatcaggaatggtggaaagccgttccttcttccgccgtcatcggagaagagaccgggtgtttctcgaagaaagagagcatgcgcttgtagtcttccaggaacaggtctgccaaatctttggagaaaccctggcgaaccatgacgcgcatcaccaccgtatcctgacagttggcagggagcgtgaaggcgggcacctgccaaccgcgggttctcagcttgtccgaaaggtcaaagagcgtgtagttcgcacgggctccatccttgatgaagaagcagacggcgggaatacctttttccggatcgcccgtacaaatgaattcatacggccccagtttggaaagctcatctgaaatgtacttcgctacttcgtaggcctgtgtatggatgttcgtatagccttccttgcccagtcggatgaaatcataatactggcagataatctgtccggccggtcgtgagaagttaatggcaaaattgggaatttccccgccaagatagttgacattgaagatcaacccttcaggcagttcggaaatatctctccaaacgacccagcccactccgagcggagccaatccgtatttatggccggaagcactgatggacttgacgcggggaatgcggaagtcaaagacaagatccggggcgcagaacggagcaaggaaaccgccgctggctccatctacatggatgtcaacgctgatgccggtcttgttttcataatcatccagggccttggcaatctccgccggcaattcataagcacccgtataggtcactccgaacgtgggaaccacaacgatggtgttctcatcaatctgttccagcatccggtcaacatccatcttccattttccgggcgccatcgggatttcacgcatttcaatatcccaatagcggcagaacttgtgccagcagatttggacagggccgcataccaggttgggcttgtcaatgggtttgccggcggctttccggcgggctctccagcgccacagggcggccatgcctccaagcatgcatgcttcactggaaccgatagtggaacaaccaataggcttttcattctggctggcattccaaagattggcaataatggcagcgcagcgcatctcaatagcggctgtctggggatattcatccttgtcaatcatgttcttgttaatgctgagattcatcagcatcctgacctgcttttcatcccaggtctggcagaaggttgcaagattctggcgggcattgccgtccagcatcaattcatcggacaccaattggaaagcgtcctccgcgcgcatcgcataatccgggaactcatccttggggagaaggttatctgcttccggagaaccgaaaatggaattttccgcccgggctgtatcgggtttttgatttggatcaaacatgacggtatctattgtttcatcgtttccgggccaaccgtgaaaggcaacccgcatgaaggatagaagcacccgcgaataaaagcgttcatatttccattgtcattatcctaggtataattttcccggaaaaacacagagtcgagatttatttcatcattcattgatgactaaaaattatttaattgcaaatatctttataaaaactcgccaatatctccagataactttatgtatgacatctccatattatgacagttaagagaaacggacgttttcggatgcaattcccagacgggataatgtgttaccccctatcttaacaatacaacatccattggaaaaaactgtgtcacggacttttacggttcctgatgctgaggcgtgcatgcgcactttcagaaagggaaaaatacggattaacccgaatttccatcaaaaaaactgctgcacaataataaaaccaacatcgtggaatcttccccgcttttcctgatgagcaacttctggtgcagacagggggaagaaatactcaacctataccgggttaatgccgtggcaagttacacccttttaagccacggctggcagcagaggtaccttctccccctccctgcactttttacccggtcaacaggtggcattccttcaagattactcccgttcaattttccggaaggtatccttcacataaagtacatgcggataaagaatggaatccggagctactttgggatgattgaattccgctatttttcgcattccaacacgttgcatcacagcttgtgaagggaaattcacgcaagcagtaaaagaatataccctgtcaaagccgaatcgtgcaaaaccatgtttcaggcatgcacgggcgccttccgtagcgtatccgtacccccaggcttccggcacaagcctccagcctatttccacacacggtgtaaagtccgcttcaaaatcagcccaatgaaagccgagaaggccgatcaaggaaccggaatgtttcaattccactgcgtacaatccataccctctttcatccagttctttccgtatacggttccacatggaaagagaatccttttccgtcatgacaccggggaaaaaacgcatcacctggggattggcgttcatagccgcaaaaaaaggccagtctttttcccgccactcccgtaacaccaggcgttcagattccggcaatgacagttttcctcccggcatggccttagttgtacatggaaagctctgtttccagctccgggcagcgattcacgcgaaaccgttcatccagttccagaatttggctatggcccaggctgtccttgatggtgagattgactttggaacgaccgggatacctttttagaatatcccgtatctgttccagattttttctcgtgtggcggaggggactgacaatgatattcagaggcccctgatccccggatttggatttgcgctttttgcctccaagtgggtcaatgctctgggcagccacgcttttggaggatgtacggtcatcctcccggatgttggctcgcacggagacgaaaacgcccggctccaggcctccctccatttcctgagccttttcataaacatccgaccacaacaacacttctatgctgccggtaaaatcttccaacgtcagaatggcgaattttctaccggccttactgattttgggggtgacggaacgaaccatgccggcaatctggtgcttctgcttgagttcgtgtggttccagcgtgtcaatgagtcctatgcgggtatatttttccgcatcaatgacaccgcgcatggagtccaggggatggccgcaaaaataagcgcccaacagatccttttcatctcccatacgctgctccttggaccactctggaacggcaggttcatccttcaccctgggcgcttcaaaggtcatgtcaaacagagacccctgccccagagccttatccttatgtacctgggaagctccgctgagggccaggtccacacgttcgaacagaacacaacgcggctccagcgtccagtccagcgctcccgcacgaatcagggattccagaatctttttgttgacagatttggaatccagcctgttacaaatgtcctccatactggaaaattccccattcttctctctttcttccagaagaatctgcatagccccctctcccacgttcttaatggccgccagcccataacgcacggccagcttgccggagggcattttctcaggagtgaacttgagcatggatttattcacatcgggaggcaggatctcaatacccatgcggttggcttcctgaatgaacactccgattttgtcattgttcgcctcattagacatcagcccgcagaggaattccacagggaagtgggccttgagataggccgtccagtaggaaatatgcccgtagcaggcggagtgggatttattaaaaccatacccggcgaatttttcaatcttgtcaaagatagctgtagccgttttttcatcaatctggtttgttttccagcatccttccacaaagtgggccttttccttggccatctttgccgggtctttcttgcccatggcgcgccgcagaaggtcggccccgccaagcgtatagccggccagcagcttggccgccgcctgcacctgttcctggtagatcatcacgccgtaggtttccccactgacctgttccagcaaaggatgctcatactccacctggcgcagtcccttcttcacttcaatcatttcatccataaactgcatggctcccggtcggtaaagagccagcaagtcaatgatgtcttcaattttctgaatcccgtaacggcggcaagtgtccaccataccgccggattccaattggaaaacccccatcgtatcccccctgttcagcaagtccagggtttcccggtcatccagagggacggaatccagtttgaactccggcacgcgccagcgggcgtattgctccgcatcatgcatgacggtcagggtcttcaaacccaggaagtccatcttcaaaagccccacttcataaatcgcgctcatgtcgcactgggcgacgacagcggcatgaggatcggacagatcgtcacgggtaagggccacatgctcgtccaggggacggtcaccgatcacaacacctgccgcatgtacccccacgttgcggatcaagccttccaggcgggtcgcgtacccccacaattccgcatacccctcatcagaggcaatcaactccctcagctcctcgttactcttgtagctggactgaagagtcaccttggggccggtttcgataagtttggaaatacggtccccgtccgcataggacatatccatcacacgggctacatccctgagtacggacttggcccccatggtgccgtacgtaataatgtgggaaacagcgcgctctccgtatttctgccgaacataatcaattacttccggccggcgtgtctggcaaaagtcaatatcaatatccggagggctgacgcgttccggatttaggaaacgttcaaagattaatccgaatctcagaggatctatgttcgtgattttcatggcataagccaccaaggaaccggcggcggaaccgcgaccgggacctacgggaatgtcatgatccttggcccagttgatgaaatccgccgtaatcaggaaataggagggaaatttcaactggttgataattccaagttcataatccagacgatcgcgcaattccttatctgcagctacacgttcctttccgtaccgttcttccagccccttatagcatactttacgcaggtattcttcgcgcgacgacccgtccggcgtgccgaattcggggtatttctccgtactggtggaatccagtttgatggcaacattgcaccgttccgcaattttcaacgtattttccacggcctccggataatccttaaacacctcccgcatttcctctggagatttcaaatacacttccgtggaatagcgcatgcgttttggggaagccagtttttcgttggttccgatgcaaatcagaacatcgtgcatgtcgtgatcttccttcctgaggaagtgcacgtcattggtggcaacaatgggggtattggtcttgcgggcgatacgcaccagctccggcaggcattttttctgttcctccatgccatggtcctgaagctctacaaaaatattgtcgtccccaaaaatatcctttagcgccagaagggcttcctctgctttttcaggctggtcattgagcagccactcattaagcggtccggcaatgcatgctgtacaacagatgaggccctcatggaattcccgcagggtttccatatccacgcggggtttataataaaagccttccaagtgggagcgggacaccagcttaaccagattctgccacccggtttcattttccgccagcaaaaggagatgtgtgtatttgcggcggccgggaagctgttttttcacgctgatgggcgtcggggaaaggtaaacctcgcaaccaaagataggctttacctcctgcttccgcggtccttccggatgctccttgttccaggcggccacggatttattgaggctgtttgtctccatgaccagttcaatggctccgaacaaattgccgtgatccgtaacagcaacggcgggcatccccatgcgggaacactcagcaatgaggtccttgatatggacggcgccgtccagcaacgaatattccgtgtgattgtgaaggtgtacgaaggaaccgggcatggatggatcctgtaagcggttaataaaggaaatcagcggtgaacagggcattcggccttcatggcttccacgcattcccggataaggtccgggccgcgataaacgaagccggtataaagctgcaccaggctggctccagccttgattttggcgacggcatccgccccgttcataatgcctccaacgccaatgatcggaatacgtcctttcaattcggaagcaaaagctccaataacttccgtggaccgttccgtcagaggagcgccggacaggccgcctgcttcttcatgccgaggattggcctctaccccgacgcgggaaagagtcgtattcgtagcaataagaccatccagtccctcatccagaaaaacgcggctgagctccgcaatatgctcatctgtcacatcaggagccactttcataaaaatgggcacatggcgacccgtttccgcagccaggttggattgctccgatttcagggaagccagcagacgggcagcgggttccgccgcctgaaggtcgcgcaggcctggcgtattgggagaagagaaattgatggctatataatccgccacaggccaggccgcacgcagacaagtaaggtaatcctgggcggcatcctcattgggagttattttatttttcccaatattgacacccagaacaccgtgaaaacgagtggcggaacgaatgttttccactccggcggcaataccttcattgttaaatcccatccggttgataatagctttctggggaatcagccggaacaggcggggcttttcattgcccggttgcggccggggcgtcagcgtacccacttccacaaaaccgaatccggcctggccaaaagcgcttaccgtatccgcttccttgtccattccggcggcaagtcccacccggttggggaatttcatccccaggatttccacaggatcagaaggaacttcccccattactagaggcagtacacgcatcttttctgccagacgcaacccccacaaggtcaccttgtgggcagtttccggattcatttggaataatacacttttagcggcggaatataaggcgggtgacacaatgcggggagtgtatcacaccctcttttagggtcaagaatgggaagcgtcttgccgggatgattttatccagtacaattccttgccatgaacaggaaggaatgcctctcatcctgccgtctgtacggtattgtagatatgggatatacagctgaacatcaactactccctgtaacagaaaaactattggcaggcggcctgcgcattctccagctaagggcaaaaaaccataacccggaacacattgaaaatatggggcgccagcttgcccccctgtgccgtaaatacggctgtcttttcatcatcaacgattatcctgaaattgccctgaacatcggcgcagacggcgtccatctgggacaggatgacggagacttggcatccgtaagggggctgctgggaaaggatgccgttataggacggtccacgcatagtcctgaacaggccctgggtgcatgtggagagcaggcggactatatcgggtttggtcccttgttccccacgggtaccaaaccgggaagacaagccattggcctggaagacatcgtaagcgtacagcaacagctaccggaaaatttccctgtcttctgtatcggcggcatcaatgggaacacactgccctccgtactggaggcgggggcaaatagggtagtcatcgtttcctggctgcttacacaccccgacatcacgggaacagtcagaactctcagaaaagaactgggagaagcgtaacgaaaaacgcgcacctccatccatgttatccctgcctttcctcttcctccggagacagagccggacgggagatcagaaaaacggcggtattcacaatcatctgcaaaatgtgctcctgatccttcatccacggttccttttcttgaagatccatgcacgcgacatatttccccaacgtagcatggaagatggagctcatgatatgcgcatgccaagataaggaaagctcatcatcccacggacagaatctccggattcttgctatcatctcctggatagatggagcataaaattcatcatagatttttcttcccagatattccggctcctgcggcaaacgccacaataaacggacatgatccggccctcccaggctctcatccagaaatagccggaaagcaggttctataaatgcacgggcatacgccctcagggacggatgaagatccgcctctttcagcatcttcatgcgcgctttcatcagaggttccgcatattgtctgtaaacagccagatacagtccctccttattctcaaaatagtaaacgatagaagccagattaactcctgcttcagaagcgaccgccctcatggtcacgccattaaatcccctgagggcaaaaagcttctgtgcagcacggaggattttgccgctggtttccgcagaacggtcggactgggatttgcgggtagaagacatctcctcaacaatcagacaatgcgccgcctagcgggaagaacggcttgagccgatggcttttaccaactgttccatgttttgggaggactgaataggcttgccgtccttgtccaccagaatcatggtagggataccgcgtggagccaccttcttggcaagctccgtcaaatcctctttcaacaggataggccatggcatgttattggcagcagcccatttttgggcggcatccaggttctggtccagattgcacatgattacttccacatccggattatcctttaccaccctgttataggcctccacgctgtgaggcgcattccggcagcaaggaccgcaccagcttgcactgaaatacaaaatgaaatgcttgggattcaatttcccgtccctctttttaagtttgccgttttcaagcatgtaagtctttcccttcatctcttccgccacagggccggacggcatggacgaccattctgcaataggcttgccgataacttccttgtgttcctccagccatgcgcgatcttcatcggaaagcttttccagcggcatcgtaatgggctttttagccgtcgtcaccaatttgacggtcttcatattcagggctactggacgggcttccaccgtactgcctgtatttttattagtccaggtgcgaagggaaggatcatccgctgctccggaagaatccgcccaacagagagaggaccccatcatgaatgtggatgccaataagatacaccaagatgaaaatttcatatacataatgctaatatactatttcttatcttccatgtcgagaagctgattccaaaatttgcctggcccgggcatgtcccgggtcgcggcgcagggcttccgcggcagcggcagcggcctcacggtaccgcccattgcggtaaagcatcaccgcaagagtgaaaggaatatccgcatttcccttttccagggaagaacagttttccaaatcctgcaaagcctgctccagccggcccactttttcattcaacagagcacggttaaacaaagcacgaataaaggaaggctctatttttaaagcttcgttaaaggattccaaagctcccggctcatcattattttcaatctggcccagtcccaggagataccacagattggcatccctgggagccaggcgtacagcctcttgcatctgatccaccgcctcccggctgcggccttgagaagccaggaaaacggcataatcacggtgcaccacggatgaagtggcatcccatttcaaagctttggaaaaccacaattccgcagttttcacatccttacggctaatggctatctgggccagcttcatagctccggaaggctgatccgcctggtgcaaagcggcagcagtaagctccttcattcccggactgtccggaggcagggaatcccggagagcccattccgcctgcaagcgcacgactctgaacggatcattaagaagtttgcccgcagcaggattacccactcgccccatcactttggcggcggcggctcgcgtcagaggatccgggtccttaaccgccgccgcggccacttcctggacggcgggttcatgagcccatgcatccatcaaatccaataacgtagcgcgccatgcacccacttcctccctcttaaaacattccataagcagaggcaaaacatcttcctttccttcgtaggcatgctgaacggccctggtccgttccctgtactgcgccattttgggtttagctccgtaatatttctttaccgcctccgcagcccattcattgcttttttcctcgtggcacatggtacaggcattcggaatacccaactctacgctcagcaaaggatcaggagaattgaaagaatgatctctgcgggggtcccgagccatatacaggctttccggcatatggcattccacacaccgggcacccatgctggactgaggacatggcgtatgcgtagccatgtcaataacgggagcttttacgccgtttaccgcttctccagtaccgtgacacctcaagcagagcgtattatcttcttgaggaagcttcagtgttcccgtatgcggatcatgacagtccaaacaggtcactcccgccttgcccatacggcttaacctcagaccagtctcgcaataatcctcatccctttgcatgccattgggccagaaaacgccgggctgcacgggaagcaccagttggaaatgattgtcaaagcggtcacctacggcaaaatcatgatcaaattcatccctccgggcatggcaggaagcgcagttatcatgaatctgctgtggcgtcagcttgttcctggtggaaatcatgcaacccgtccccgcctccggcttgtccagcagggggccgtggcattgaatgcaagtcactccgggttccgtccaggtagaagcataccgatctttaacaggatcataattcttatggaacaaagacatgtggcaccacgcgcactgcgtgttccaattcatgcctcgtcctgtccagtgcccccagtctcccggctggcgggactccttgccgaaaatatcaaaccattctttgcggttcacgtcccatgcagcgctcaaggtatgaaaaccgccgtccttggcaggaaccagatactgcaccaggggaattctccctgtggcccattccgcgcgccaggaggttgaagactgaccgtcatggaccatgcgcccgtgaccattcgtagagaattggagaatgctgccatgagcgtccagcttcatgttatggaacgcttcagattcccattgatctcccagtttgcggaatgcccaggcatggtctgaaccggcccactgacggaattccttttcatgacatgctccgcactgcatggaaataggcacctcattctggtcccagtgctcactgcctcctgaaaaaacaaccggctgcgctgccgctccagaacgtctgtccatccaggctttcaccattgtgcccagtccgatcaaagccccaagaacaacgaggagaaccacccatttcttcatggaagggcggttcacaggggcatcagcagattcaggggcggacatggcggaaatattctgccatatcatacgcgctccaccaaggaacttttacatcaggcagcacagtccttgacatgcccagtccgtaaacggcagattattcctcctcttccaggacctcctcccgcatcaggggagtaatccgggtcacggtacagcgctccacaccgccattctccgtccgggtcaccttgaattccagccctctatagccgacagtatctccttcctccgcaggagcttccagcaaattaagaatcaggccccctacggtgtctatttccccgtcctccaaatccatgtccatggcctcccccaattcctcaatgcgtgccagaccggatacgtcacaggagaatcccaccgcatccctagacaactccgtcagcactttaatgcggcctcggtcccagcccattacttcggaaaaaacatccgtcagggtcaaaagtccggaagtccccccgtgctcatccagaataatggcaaggcgcacattgtccttcctcatgatttccaccacattgtcaaacttcaccgttttgggaaccttgggtatggcatgaatgtattcaggagtcaaagcctttctgcggaacatgatacggaacagatcgcgggcatgcaccatgcccaccacatggtccagatcaccgcggtagacagggtaacgcgtacggcgagtgcgacgcacaatttcccgtatctgctcatgttccgccccttctggaatggcgtctatcctgacgcgcggggtcatgacctggtgtacatacagatcatccaggtcaaacaagccgtccatgatgcggccggattcctgcggcaacgccccgttctcatggctctcttcaataatatactggagttcttccgcagaatggtagtgggacttggattcattacggtccacacccagcaaccccagaaagaaattgcccagggcattcatacccactaccagcggatacagacatagctggatcacgtacatgggcatcgcaatgatgaggcaaagctttgcggcgtactgtagggaaagcgccttgggcaccatttccccaagaacaatatgcaggtacgtcagcaccgccacggacaggatgctggctgcgccatgagccaccagccaggaagcccagccgtactgcgccaaccattcatggagccatccggctaccgcatgctctccgtacatacccaaccccagactggcgaacgtgacgccaagctgcgccgtagcaatgtagcggtcctgtaaccggggcgttttcaatatctgggaaacgcggcgcgccaccatgttgccggacacacccatctgctccaatgccgcacgcggagcgccaagcaacgcaaattctgcagccacaaacaggccgttcagcacaatcagcaacagaataatgaaaaccgtcatcatgcatccaccccgctttccatggcaaattcattttcctttctctccggaggcagcagcaggatagaggaaacacggttatggtccatcttttccaccacaagcacgcgtccggcgataatcaggcggtccccatccttcggaatgcaggacatgtgcttgatcacgcagccgcccacagtagtggcgccattcatcaaaaagggtaccaggcattccgccttatgggcacgcatcatgccggggatacgcacggaaccatccggaagggtttccaccttttccccggagcggatgaattcctcatctatatctcccaccatttctcccagcagacgttccagcgtcaccagccccacaaacttaccgtattcatccagaacaaaggcttccttggccctgtcttcccgcaaacgggccatcagcatctctaccgtctgcatttccatcacgcatggcacctgcctcagcatggaacggagaggaggcagaattcccttttccgcataagcggataccatatctttaatatgcagcatgccaatgacagattcacggttcccttcatacacgggaatatgggtatgaggcctatctgcgatcatattcaaaatatcttcctgtgtggcatccacatccaggcaaacaagctgaaaacggggaatcataatttgttccaccgttcgttccgccagggacaaagcgctgtgcagccgttcatgctcatcttcctccaacatcccgccctggtggctttcatccagcagcatattaatctcctgctgggagtggatgtgctgatggccgcctggtgggagccggaacagtttaagaagcaacaaaccgcttccattaagaaagtcaatgaaccatgcgaagaaagccagtgtccatcgcatgggataataagtatacaaggccgcctgcttgggaaactgaagagccagggatttgggcatcaattctccaagaattacctgaaaaaccgtcaagcctatcagcacaacaagagcggctgcagaattggccattacggagtccatcccgccaaaccgctcaaacagagggaacagataggcggccagttcaacctgtccgtatgcgcccaaaaccaggctggaaatggtaatgccgaactggcaagccgcaatgtagcggtccagctcttttgtattttccaaaatcttaagcagatgaacagccaccctgctgccgttctccgccatttcccggatcatgttgcggcgtacgctcactgcggcgaattctgctgcaacataaaaggcgttgaccagaatcagaaaaagaataacgaaagtgacaaaaagaatcatgtatggcaggggtgtccgtaaaacgcaacgggcatccgcatcataggaaccggaaaaatcctgtcaagaacgggaaacaaaaaaatctgccatgcggaaagagctccattccttctgtccctttccagcattccaaactttctccttccggcacaggtaaaaaaattccggctgatcacgcaagcagttgaaccaactgcaaaacatctttccagcaaccggaaagccccgttcccggaataaccggaaacggggctgagagtttaaaggctcaacgaaaaacgttattccgtaatgccggcggcttctgcttcggcagccttggcatcgcgcaaagcggcacgtatggacattttcacgcgtcctttgtcgtcaataccgatgcacttggcggtcaccacgtctccgacgctcacgacgtcctccgtcttggcggtgcggccttcggccagttcggagatatgaatcaagccatccttgccgggcagcacttccataaacgctccaaaggtggtcgtggaaacaatcttaccggtgtacagttccccgatttcaatggtcttgaacatgcgggtgaccaattccagagcacggtccaggccttcctgcttggcggcgtaaatatgcacggtgccatcttcctcgatattgatatcggcgccggattcggcctgaatagccttaatgttcttgccgccggggccgatcagttcgccaatgcggtcggcgggaattttggtggtctcaatacggggagcattcgggctcatctgggccggagctgcaatggcttcattcatgaccttcagaacatccgtgcggccggctttcgccacgtgaatggcttcctccaatatggagaggggaatgccgggcagcttgaggtccagctggtagcctgtcacgccttccgacgtgccgcagagcttgaagtccatatcaccgtaaaagtcttcggaaccgatgatatccagcagagttttgtaagaggtgatttcatgctggtcattctgttccgtcaccaggcccacggaaatacccgctacagggcgcttgaggggcacgccagccgccagcagagacatcgtgcccgcacagacggaagccatggaggtggaaccgttggattccatgatttcagaagagacgcgaatggcgtacgggaattcctgttcgccaggcacgactggagcgatggaacgttccgccaaagcgccgtggccgatttcccggcggttctgaccgccgaaacggccggtgtctcccacggagaaaggagggaaattgtagtgcaggatgaaacgcttttcattcacgctgcccgtgtaattgtccatgtactggcgttcttccatcggagcgagcgtcgccaggcaaagggacatcgtttcaccgcgggcgaacatcgcggaaccgtgcaccacaggaggcagcacattgacttccgcagtcagagggcgcagctgcttgagagcccggccatcggcccgcttgtccttttccatgatggagatgcggaaagcctttttctgaatatattcaaaaacctgttccacatcaaagtcagtagcttccggatggcgttccttgatggcggcctccacttcgtcacgcagggcccccacttttttctgacgctccaccttggaaggggcgtaaatggcttcctcaatacgatcgccggcaatttcatagccgatttccagcaattccggcttggcaaggcaaagttcataagcgcgcttctccttaccgcaaacggcgcggagctcttcctgcttttcgcaaatgaccttcacgttctcctgggcgacacgcaaagcggcgataaaatcttcttccggcagttcattagcggaaccttcaatcatgatgacctgatccttcgtgccggcaaataccagatccagctgactatgttcacgctgggagttggtcggattgataacaaactgtccgtcaatacggcccacacgcacagcccctacgggttcggcaaagggaagatcggaaacgacacaggcggcagaagcgccgttaatgctcaggatgtccggttcgttttcaccatcggcggagagcagaagcgtaattacctgcgtatcgtagaagtagcccttggggaacatcgggcgcagggggcggtccgtcatgcggcacgtcaggatttccttttccgtaggacgcccttcgcgtttgaaatagccgccggggaacatacccgccgcagcggccttttccttgtactccacggacagggggaagaaggtttgcccttccttgactttggtggcgcttaccacggtcacaagaacgacggtatcgccgctgcggacaacaacagcaccgtccgccaaacgggccatcttgccggtttcaatcgtgataggattcgtaccaacgttgcattcaactgaatgtatgctcattatattttttgtctttcaatcacccgcagcctcatcagcccatccaggccggctccgggcgggaagcctgaatggcgtcaggtacgggcagtgcctcaggaagatgttatccgcaacagtcctttcccagaaacagaggggggaatactgtccacgcggcaggacgcgcatcccagatggatcaaacgctccggcccagtcttaccggcttgacagcctgtgaaaatccgaaaatttctcaaggcatgcccgacagaaacgtttcgggaaacgaatccccgaacgtcgaatgagagcataatccctgtcaaggataatgcaagcaaatagtttgataaccatagcagtccatttccttccagggctttaaatatccacccgcatggggagaaaaggtatttttcccatctcaccttcatccattcaatattcttcgcattcctgattgaaatgcattactccaagcaaaatatccggaaacgtccgccttcccttcttcacaggagcggaaatgtagaatttaaggacggactgagtattcctgcctgactcccataacagccgtccactgctttttcatccatattttcctattctttgcgcagctgcatcatacccgcaataccggactttccgtccccagcaaacatttacgcaggaataaaggggcagtcatgccaacaaaaacaatctccacactccagaatatcttctttcacaaaaagacaggcctttcaaactctcctgaccaaaacacaaatccacagtcacccgccatgccccccttccatgacaacgctaccacgccagcccctcccataaaaacaacggccgctgcggaaaaccgcaacggccgaatcaaacgggaatatgctccgccttttagcggcgaaggccaagacgctggatcagactctggtactgggccaaatcttcacgcttgacgtaatcaagaagcttgcggcgcagagccaccatcttcaacaacccgcggcgggaagaaacatcatgtttattcgtgctcaggtgttcggtcaggtgggcgatgcgctgggtcaggcgggcaatctggtagctggaactaccggaatccttttcatgcatcttgaattcctgcaaattgatttcgttactcataagtgttttccttgaatgtatttagctcgtggcagcggctaatcgacactgtgagggcgccaactatgcatcatccagccccaaaagcaattcaaatttcgtcatcccggggaatttgccttcggtccctgggaaagcggcccctctccattttccccggtgtcccagacttcgcggtccttttccgtcacggagcgaaccacacggcagggattacccacggccactacattggcggggatgtccttcgtcaccacgctgcccgcgcctatcacggaatttctcccaatacgcacgcccggggcaatcaccgcatgaccgcctatccatactccatcctcaatggtaatgggcaaagcaaattccagcccctgccgtctcagccccgggtctacgggatgcccggcagtataaatgcccacgttgggacctatcagcacgtcattgccgatggtaacggcagcgcagtccagcaccacgagattgaaattggcatacacgcggtcccccaaccgtatattggagccgtaatcacaacgcagcggaggttccagataacacccctctcccatttggccgaaaagctcccgagccaattcccggcgcaggctttcattttccggagcggactggttataacgggaaacaagccggcgcgccctgagccgggcggcagccaattcagaatcctgggcatgatataaacgcccggacagcatgttattccagtccttcgaggccattggatgaagagggggtcacagcgtccgcctcagaaaaaggcagccgcccgtttttctgttctccaacagacggtatggcggcggcatctttttttacggacgtttccgattttacaagttccttctttccggaggaagctgaatttgcgccagccaccggggcagcgggcttgtgcaccgtccggaatattccgaacggcttttgttgaagctcgtgaatattccagtttccatccctgacaaccacacgggttcctacgggagctatttcaaagagatttttcgcaatcaagtggggaacacggatacatccatgggaggatggatgaccgggcaagtacccttcatgaattcctacagccccgttcactctcatgaaatagggcatcttggcaggttcaaacctctcgccggggcggggggaatcccttcgtatatccccatcccgcaattctccgtccgcgttaataaacgcaccgtaataggaatgatggtcttcctccttggaagcaatgaggaagtagccggagggagtcatgccggaacttcttccggaactgatgggggcatacgcaatgcggtgcgtcccccggtagatatacatcatctgctttttcttatccactacgaccagcagctttccgggcagcgacggatcatcttcccacttgagcaggtgccccggaatagttcccgtttcttcaaaataccccgtcatttcttctaccggaatatgggaagaggggacaggggaaggctcccttcccgtggtaccgcaggacgaaaacaaaaacggaacacacaggcaggaaaccaacggatggaaaagggataatttcatctcaataagtcgcatcactgcgttagacagctggaggccggaaaaaagaaccgctttttgacaaaactgtcaactatcaatcaaaaaaatctcttttcctttactcctgccctccgttaccacatccgggcgcgcctgccgcgctcccggccgttcccggttccgcggagcaggccatgggaccaagcctccgcaaaggttcgtgcggcatccgccgtatgggaatgcccgtcatgcacagggctttccgcaatggctccgcctacgccgggaggcctggacctgtacaactccagatgctccacgcctcccggttcctcttccccacagaagcctcgcgccttttcctgggtgcgggcatgaaaaaaactgcgctccagcaattccctcagcgtattaatgccacgccagacatccgtggttctggggacgacgcgcacattcaccaatcccagcctccccatattctccacataagaaatgccgtgcgcatccctccgtgcagcatcatgaggcaaaagatggaatgttaccgccacaccatgatttttctcccagtccttcattttttcaacgtaatgggccaggggctgctggctggcggcataatggtccagccagtggaaactgtctcccatgatctgcacaagccaaatggccgtatggtcactcagccccagatcccatgccgtgaaagtgggagcgtccggatcagcctcaaactctacccctacccgcccccgctcccgcagggtcatgatacggctgccgtaaatactgccttcttcccctgtagcaaaagcctcctgcggcgttcccggatactcctgcttcatggaggcgcccatcacccgggccatccgggcataccatctcttctgccccgcatccagaaccactccggtctcccgttccagagaaaggaaatactcatccagttccctgctccatctgccgcgccccggcaaagtgtactcatcctggtcaaaccagctgaaaaaaaagaatctgaaatccaagggggaaagctcgcttttgcccatgttttccatggcctggcgcgtcagttcataattcactccgtaccgtccgccctcatgagtgctttccttcagaataaaacctccggggggaactgtattgattgcccccgtacggatttccctggctctccacggagcatgcacggaaacatacgccagctcggaaacatggagaaactgcatggttccccctcgcagattagtccccacccgcacatcgctcccattggagaaagccaggcggctgcgcgccaacgtacggggttgccattccccctttttttccacgccggacaggctcttgattctctctcccagccgggccagggccacatccatcgcagaggggttgggcggcacgtaatccagatggtcccaggcaaaatgcagcttggccagtttctgctgggcgtccggcaggcttttatcaatgattccgcaatgaaaattggaccggaacaggctcatatccagcatcaacatggccacatacgtagaaatgcccaactggcgcgccttcaggatgtcattcctgtaccacagccgctcatgcagccgccgctgcgccctgttcagggaaaaacgctggagctgaccggctttattttctatccagtacaggtgttccagcctccaaagctggctggacaggacggactgccacgacaggctccatgattccgtcaaatgattagaattttccatactcctctattaattctttcaacagggctccttccctggtcatccccttctgggcctccgtccccttgtccaggggaaggcggtatgccagtggatcgttcagcacgtgggaaacgaaccggagtgcctgcaccatcacgggatcaagcagatcaagttttcctttcaaataactctcacgcacgcccagttcttcatacatcctgattacatcctccatgaagcatcccacagcctgtcttctgttccaccaccatcgttcctgagcatccgcatcccccagcgtttccaaaatccgacccaggaaccgggtacggctcgcccgtgaatcttccggggaaggttcctctccggctcccgtaaaacactccagcggaatataggaatcccgttcggacaccgcaggcgctccccggctgtccagataaacgccgttccatgcatgtaccacgtagggcgcgcgtgcctgccgtacgggactttccggaatgcccggcatcaggcgcacggtatgccccgggtcgtccgggtcacggtaaatcacgcagttggcatacatcgcgcgcgcttcctccggctcaggaagaaagggaagcatgccgcctctcagttcctcctgcctgcggtccagaacaccaatcagggaaatggcctcatccaacgggagttcccggttccaggcagacgtcacccccccgggagccgctccggaatcaatccggtaaatcttccctttccaactaaccccggattccgtagcttccggtcggcctgcaaaatcccgcctcaccgcatccagcgtctccacagcccggaccacatccggacggctacgccagacggcaggggcgggaacgcctcgcctgacggaaaaatcttcttccacatacaggggcgcttccagaatgggttccggaagatgttctcccaaagcctccagggaaacatccttcgcgcgcagaggtcccaatccggtccggaacggctttttcaccaaatgcaggtacaggccgggatgttccggatccggacgccaggaattcagctgggggaactcctgaagcgcccgggacagttccctcatgcggctttccgccagccgctccatcctgcgtacggaaccgcccgcgtatccgtccagcgcggacagggaacgcaccagtccctctttcacgtgatccggaacggtaaacaacagccgtccggacatcaggctgtgagagtaccgctccaccatggggaggcggacctcccctccggccggatcccaggcgcgctccgcccgtatgcgttcattcataccaaccgtctctcggagcattcccataaactcggcagtgtccgcatcctccctcagcgttttcttcagcaatccggcccggcgcaccaattcctcaagaggttccggaaccctgtcaggcattgcggccccgtaacgcgcccaggaagccaccgtttccggtacggtgtcatgatccagatgggcaaaaaaatactccttggacagctgggacaactcttcaatcagttccgtttcccctgggagcttcctgcggcgcggcacacgttccaaatgtttcaacatctcccaagcgccttccggggaaagctgatccgtgcgcatcagccggtcccatacgacttccgccttgtcttcgatcaaagccaggggattggccgtattatgaagcctcagccggtgcattaccaaccccttggctgaggaaacgggcaaattatccgcatccacgcccagcctctgtacggaacccacatacttttcgtgaatattcatgcgctccaacagggcatcacggctcatcagcgtttcagcggcaaggcgcccccggcccgtcacctccagacgatccccggaccccaccgctccgcgcacgccgtaaccagctttcagcatatccgccaccgccatggccgtcaggctgtcatacaggcaggggagccgccccccctgcacgttttccaacccggtggtcagcctcagataattggtatcccattccggccgcccgttatgggcatgccattcccagctacggatcaaatccctcttagccgagcaggcggcagaaaacatcatggaaacattggccatcaggtccgcttccgccgcctcccgagaaggatgccagtccgaccaccttccgttgggatactttactctccacagcctttccgccccttcccctccgggtgaggactggaacaggcgcggggtcagcaggagaagactctccaccgctttccgcgtccccggataaatacgcggcgaaacctgttccggaccggcatgcagccgcggagcatccagcacagaggcataacgggccacgttctccggcgccacctccagaaaccgggccagcaaccgcccgtaactctccacgggcgtatagccgcgccccacatgcacgtcaaattccttcatgttgggaagtacgtggtacaggctgttcacatccgcctgggttccccataccatgcggttcatctcccgcagctcagggcttaccccatgacgttcctctccgccaagagaagccatcatgccgctcatcctggccagggcggagggaaggccgtccggattaaaagattcagacaacaaatccggagcattcagcaacgcactcccttcctccagccaccggcgcgccctgccgcaggcgccttcatcccggcaaaacgacttccataaacgaaaagccacatgcccggacgcctcttcatgcggcacgccgtgtacccgctccatcactccttcataaacattggctcgtgtccgcagatccatatcctccgtaacggcgtcccagtccctgccggaaaaacccgcacggcgtcccgcctcttccggataagccagcagcaacatcctgtacggccgataggagcgcttcttcagcctgtccgccacaaacgctcggcgcaaagcatccgcatgaatatcatattcctccgcattccttaaacgccatgggatttcccgtccgttcctgttccggaccagacccaaatcttcctcttccatacggcccagagtctcataccaggaagaaagagcctcctctacggaaggccggccctgcgttcgcttcatctccacaccgggagccggttccgccgcataaacaagctgcccgtccgctgcggcggcttcacccacgcggggcagaccggcacgcaacagccacttggttctggccgtaacataatccggatgaggaaaaagctttttcaacaccgcttccgattcggggaaatcccgcatcttccaaggctttgtacgtacaggagaaggcaaatccaaaaaatctctcacatcctgttccgttttcaaaaaaggctctccggcttcatccagggcgcgagaccactccaaagccttcctggaaatgtacaaagacccccacagcggagaattacgcagggacttctgcaacaactctccggcacggtttacatccttctcctgcaaaatccgggaaaccgtttcatccggaatgccgaatactttcagaggggaaccgtctccaagcagcattccggcatggcggaaatggttcagagcgacctttcccgcgcctatcagcaggaaaggcatcatcatgacggcctccctcaactggtcatccgcggaagcctgtctggccttccatccctcccagtccacgccggacgccttattcgtaagagctcccacgccttcctgaacgaccatgggcgtcaactccatcaatttattttccgcctccatcttcacggcatccgccgcaacggctcccattccggaaaaaaacgcaccaggattccctgatgcgggcctcatggcccggaacgcccgcattccctgccccagcatcttctggcccagtttcgtcattccgaaggaaagcaaggtattcaccccgccggagacgacagctccccccatctgggcatcaaacacgccgtccgggttcatgctccgggcctccgccatatggcgccccgtctcccccgccatcaacatgccaagcccggcaggaccgcaaaacgccaaagccgtggacgctccctgctgggccatgtccaccagcatctcccggaaccagggggaatcctttcccccacgcagcggggcaaactccatcctggcaaaattcctcagttcttcaaaactccgggaataattgtccagcgcctccttttcccgtccctccggcaggagccatgctgcgccgtttacggccagctgggccgcattctccgcaacctctgccgcaccgcgtttaagcgccccccccagggcatcccgaaaggcgggacgggaacgcaaatagggagccatcatgcggaacaccttctgacggtctccatcccccagggaagccaggcaatccacggcgcgtatgacgtccggaactccggcaacggctttccggttcagctgtatggcgggaaaaccttccttcaccggctcctcactggctaccagcccctccaatcccttgtggatgatcccggcggcatccgccagacggttcctgtcatccagagcatcggatacggccctgcccttcaattgttgcgccacagcctgcaaatcttccggccatgcggaaatggcttcccttccccgttcgtcaggaaccgttccgccaccggacagagtacgttcatactcttcctggtataattcaaataaagcctccctccgggaaaggcgtacctgattgtgcatggaaactgccacgaacaattcgtcatcagacttgccggacgctccatactgccgcgccacctgttcccggatactcttccagtccctccggatacgttcccggggaatcgccccagaatccgccacccaggactgcatgacgcacgcggcaattctttcccggtccgccgtcccttccggatacatcgcctccgctttcagcctcacttcccgcggaatggtcatcacatcccccgtcaatacgctattccaatattcttccctttccgactcccgttccgggaatttttccgtgccggaaggtacggagaatgctgcgttctctttccgaatatggctttcccccacagttccgggaaccgcttccggaaaactcccttccagcgggagcgcccctgtctgttccctggttccattatcttccatcatcactttccttcttttccgttattcatatctgaaaaccccacccagccggcatcctggaagcgtttctctttctcaaaaaccttttccatctcctcagccggctgctccggggccctcttcaccgcctctgccaattccgtctggacacgcttccattcctctgccgcacgggcatcctcaggtggcccccatgcgccattccggaacatggcggacaggcgacgggaagcagcgcggcgcaattcgcggggtatgcccaacatcacctcgcgccgccggagaagcctttccacctgaacggcaggcaaacctgaagtggccacttctatcagggcgtcagcatcttcctcccctccgcaatcctcatcaatcagcgaggtcatgcggcacaacagcatatcgtcctccggaatgctgataccggaaaattccgccgtctgcctccggtcacgggaagccgtataacgccttagctgctcggaactgatcaagccatgcttttcagcattcgccaatccgtcatcccgcagcaacccgccgccggacacggtggccgccagagcatccgcataacgccgcttcaactccccatacgctgccgcagcctcttccgccaccttcttttcctccggagtttccggcatcttctcctgccgggaaacgatgcttacagcggccgccggatcacggcggacctcctccaccgcccggttcagcgctgcgcgggaatgcgcttcctccgccatgcgggaagcctcctctcccgttacaaatattccgctgccctccttaatcctgcgttcggccagagcggcttctccctgctccacggcagactccacccccccggcccaataccggcgcgcctcctccaactgccccagatgggacatcttctgcaaataaatgctcccggcagtctccagattctctctcgccatggccacgcgctccctaaccgggccggacatacgggcaggcagataggaaggaagccgttctgacagcgccttcttccatctctcctgaaggtgttccgaatcccctccggcttccagctcccgcatcacgtcctgttcaaaacgatacatcccgtcacgggcctgcgcccattggccggcatccctcacctcctgcatttccttcagcgcggttcccgccactccggatacatccatcacgcccgccgccagatcccgcacactggcggcctgtgcttcaaaagcattcaacggaatcacgccggacaaatccggagccacatgcaacattccaaaatcctgtattcgtatagccatctttaacggcttccaagctaaagagcggatggaacgcacggcatccattccaaaccgtcaccgtccggcacttgccgcttgccaaaaccgggccgttccaacacaatcacccctatgacccgcattcgtttcaccgccgcatatgacggacgcccttatctgggctggcaaagccagccgggaggccgtaccgtccaggacgtgctggaacgagccttttccggactctttggaaccccctgccgtatccacggttccggcaggacagacgccggcgttcatgctctgggccaggtttttcatgcagacgctccggatacccaccgcattcctgcggacaaatggcctgccgcgctcaacacgcgccttccccgaaccatccggattacccatgcggaatacgttcctcccggtttccatgcccggttcagcgccacgggaaaaacctaccgttactgcatttcacgcgcacccatcctcaacccttttgacgccgggctggcctggcaccgcccgctggcatggagcgtggatattctggaacaggcggcacacctattccggggaacgcatgacttcactgcttttgccgccctgcgcggcaatgaaccgcgccctattccggagggttacttccgccgaaccatcacgcagacacaagtggcacagacaggggaacatgtcttcatcacctttaccggaacgggcttcctctacaaaatggtgcgcctcatgacgggagccgcccatgaagccgcacgtggaaaaataacgctggaagaactggctcgcctcatcaacgctccgctcccggatgacaaaagcccgttttgcgccccgccggacggactcacgctgatgagggtccattacccggaagaaacattcggagacaaaaagataacaaactgaaaacagccgtccttctagacgcgtgccgtaccgtacaacccttccctcctgatcagcgcctccactttccggttcagatggggaaccggacatacgcccgaacgcaaatcatgccgtatgcgggtggaagaagcgggttcatccccttctatgaaaagggcgcgcacccctttcctgggtgatggaaccccgccgcggcggtaaacaatgaacgtcaccaggctggacaaatattcccagcgtccccactgttccagagaatcccactgatccttgcccatcagccagaacaattctgcaccgggataacgctccgccgtcctctcagccaccctccacgaccacgaaggaggcggaagttccaaatccgtccggtcaagcacggcccagtccagcccttgaacagccagctcaatcatccggcagcgctggtcatccgtcacggagggggcctgctccttcagcggagacagggaacacggcataaacagcacgcggtccattccgcaatatttccgagcatgctcggccatgcaaacgtgcccctcatgcacgggatcaaacgaaccgccgaaaatacacagcttcaccgtcatccaccagaagtcagagtccttccgttcccttgtaaggcagaaacccgccgatgggaacgcgcaccatccttttctccagaggcaggcggcggaagcgggtaataaaatccgtcaggcggccgtaattgcgctccgtcttgggaatcccctgatggccgcaattcacatccggattataatgcagctccacatgaagatgggccggatacatgccgcggttcgtgccgatagtgcccacctgggtgccgcgcagcaccaactgccccagcacaacgttaatatcgttcaaatgggaataaagcgtctggcagcaaagaacctttccggacttgggttcgcggaaagcatggcgcacaatcaccacctttccccacgcgccccgggcgtccgccgcataagttaccaccccgtggcctacggaataaacgggatcgcccaaatcggaattgcctcctttattgccgttccaatcctcacccatgtgacgggggcttttcagacgcagaccgcgggaccggtaatagccgttgccgtcaggcttccctaccggaaaatcaaaaccgtcacaaagaggaacaagcgcaaacttgctgtcccgccgggccatgtaaacgggagcgctctcgctgatcaacgcggaaccggtcagaaaaaccagcgccagcagtaaaaaacggaaataggacatgggaacgaaagtcctttgtatgctaaacggctccctactccgtatcaagcggaattccccgcatgtcggagttagaattcactaacacgctcccccatgtttcccacttcctttcaacttgacagcaaagcctccgtatgaaagaagggaggagcgactcccgtatttttcaacacacttttttccgcatgaacaaactaaccacactcttcctcggaacggttctctcttcctccatgctgcccggctggaccgcagcaccacccaaaccatacggcgcgattccaacacccgcccaaatcaactggcagcgcatggaattctacggcttcatccactttggcctgaatacgttcacgggacgggagtggggttacggcgatgaagacccgaaaattttcaaccccacggatttcaatgcctccgatatcgtctccacctttaaaaaaggcggaatgaaaggaatgatttacacggccaaacatcatgacggcttctgcgcctggcccaccaaatccacggaccacaacatcaccaagagcccttggaaaaacggaaaaggagatgtagtccgggaattcgcccttgcctgcaaaaagcacggcatcaaattcggcacctacctcagcccctgggaccgcaacaacgcggattacggcaaggatggctacctggacgtttactataaacaaatccgggaactgctgaccaattacgggcctgtctttgaaatctggtttgacggagccaacggaggagacggctattacggaggagccagggaaaagcgcaatatcggtgacgcggaaaaatactacaactttgaaaaaatcgtggaaatgatccgcaaaatccagcccagctgcatcatctggggagcgggccactacggagacgcccgctggggaggctccgaaaaaggccacgtcaattatccccattggagcactgtagggctgaacggcgggggcggaggcaccggcaaacgcggcggagaacgctgggtgcctgcggaaggagacaccaccatcaaccatgccggctggttctggcaccagggacaggcatcccgcgtcaaatcccctgaagaacttatgcaggtatggtttgattccgtaggccgcggggccaacctcattctgaacgtggcggcggacaaaacgggcagactggatcctgcggatgtcaaatccctgctagaattcaaagaactgcgcgacaagctatatgccagggactacgcgttgggagcaaccgtcacagccagccagacgcgcggcaacgacaaaaaattctcgccctccaacatgacggacggcaacattgaaacctactgggccgtggaagatgacaacctgacccccaccgccgttattacgctgcccaaacccgccactttcgacgtcatccggctgcgcgaacaaacacgtctgggacaacgcgtggactccttcaatattgacgctttcgtcaatggcaaatgggtttgtatcgacaatgaagggaaaaccatcggcaaccaggtcatgcgccgcctgaaccgccccatcactacccagaaactgcgcctgcgcatcacgggcagccaggccactccctgcatctcggaattctccctcttccgccagcctgcgggcgccgtgcggccctccatcttccgccgcggagacaacctcgtcatcattgcggacggcaaaaataaaatcctgtacacgacggacggcagcgaacccaaagcaggatctcccgtttacagccagggtgctaaatttacggaaagcggcattgtcaaggctcgctgccaattctccaatggtaaattgggccctgtcagccaggccaaattcggcatcagcaaaaccggatggaaagtgaaaaccgccacatccgggaatgcggcggcggccatagacgacaatccggaaacctcatggcttgccaaggcggaagcgcctcaatcctttgtggtggatatgggaaaaccgtaccaggtttccagcttctcctacctgcccagacaggatggaaaaacctccggcatgacggataaatatcaatttgaagtaagcgcggatgggaaaaactggacgaaagtggcggaaggggaattctccaacctgcgcgccaaccccattgagcaatccgttaatctcaaaaacatgaacgaacccgtgcgttacttccgcttcatcggcaccagttctctggacggcaacagcgcttccgctgcggaaataaacgttttcggcactcccgcaggcaaataaaaacttccctgacttttctcaccagggcattccggttttttacggccggaatgccttttttgcggcacaaacccatttgcaaaacaggctccggcagacaaaccggcatcaaggaaaacgggaaaggacaggccagaattccgtccaactccccctgcagcgcttcaataggctgggaatgtcccgtatatcgccgcaacggccaaaagtccaaagggacggctcctgcatggctgcctttttcagccaccgccggtatgcggaacatattgaaatcggaaaaagccctgcaaccccatgccaacggcagaaccccgggaaaaacgcctgccgactgaaatcagccacgatatcatctccggaaggcttctgttccatttcctgtttgtacgaacaatcttctccctgccgtcggaaaacctggcgcttttccttacatcgtaaaatctattttagatttttatcggtttgacttaaccgattgaagaataaacttttagcgaattatttgagaaatagaggtaacgatttagcaactgtgcgaatttcagcgttttgcgttgctatgctgtcaaataactctcttatgtgcaaagatacgaatttttctcaaaaatagaaaatgtgtatgaatgtttttcttgtttatatagtctctaatttataatgttagtatttacaactgattattaatcaataatttacgagcagtaaatcggaaatatggtcgtaatctttaatcgtgtattctaaagggagaagattttaaaacagtaaacatcaaatcttcctgcgactatataccacctctattatgccgttgtatttcttggtacgaatcatttccaagtcaattttcttatcggtagcaccaaacagccttgtgccgttaccgagaagaaccggtataatcgccagatgataaatgtctatttgattgtttgcgatgagttgttgcgccacttctgcacctccgcaaatccacacatctttacccgattcctgtttcaactcctctaccagttggcatacatccatattcctgaaacggatattttctgtgccctcttcttcactgtgatgagtcaatacataggtcatcgcttccccgtagggccattggtcgggagaaagttcggtcacaatttggtcgtaggttctctttcccataatgaccgtgtccacaccactgaagaatggagtaaaggtgtcttccatctccacgtttttatcttgtccgcttatccattcaacggaaccttcgctgtcagcgatatagccatccagactgacggcaatataaaggattacttttctcataggtgtattattgtaaaagaggcagcaccatttcaaacggtttatttattgtagggatattcttgcttttgcttgctttaccctttggctttaagcaattcttcaatccgacctttcataaacccggtaagcgcgagcgtttcattttccattgtttcccattcgtcagacaggtttcccaaataggcttcctttgccgttttcaacagggaagaaaaggtttccggcaattggggaatcacccactccgcagcaacatctttcgttgtcacgtcttcggtttctaatgtaaaccacatgcgggatagcgtcaatagcacatttctttcatctcccttaacattggaaatcaaaccgggtagagaaaattgaatagccttttgtatttcgcggaacggaatcgggagaataagttgtttgcaatctgcgcccttcagcgtcatactactttttctcgcctgccataatagaatcgctatatcagggtcgaaacacgcctgcggaatcattccggcttccatctctttccgaagccactccccatacatatactcgcatttgggcggaaactgccacggaataatgtctttttgatggatgacagttatctccaatggtcttttttcggcgcaacctacgaagccggaaatttccaataattgcttggtcaactcctttttcgttgacagattcaattcttgtctggttattatcaatatatctatgtcactgtccggacgcaatttattcattgtcgcagagccatataaatacattcccaatatctgcccctgcaatagggtttctgctatggaaacgacttgcttcacttgttgtgggatttcattccgattgttcattgtattttccatatagatttgtttcctttattctttgattaatacaacagcgtcaaatgccagttccaaggcggtggatacacttgcttttccccacttccgttcttggtatttatgaggattcgagagcgtgtcggctgtaaaaagcaacatagcccatattacttctctaaattctgcacatgcagccagtgcagaacattccatttccactacttgacagccttcctctttgcggtattgcaccatttccagtgtttctcgataaaaaccgtctgttgtccatgtcttgacttccaaatatgggattttcttttgatttaaagcaaatttgattgcacttattcctgctgttgaaatctttatgtctctggatggcggaagataatggtaagaagttccctcatctctcaatgcagaaacgggtattaagaatctgttctccggaatatcttccaatacaccgcaggaaccgacagaaataatttctgtcacacctcctgctattaaatactctaaaatctggacagcagcagcactcccaaccggagccggacataaacatatcctttcctgattatgaaagcattcatagatgggatataattttgttgcactctcaaattcatctatctgtattccactgtgggcatgtgcatacttttccacttcatcccccaaaaatgcaaatacggcttttttagggaagtgctttttcccatttcccggctgaaagattgcttttgatgcggtatcgtattccaaaataggataatcgtgctttactaatgccatactatcatctccaataaaaatttttctttctcacattttctgcatctattttttgcaaagttacttttttcatttggctatacatcaataaactcttagtattttgagtatattttttcgtgaagctatcttttatcttctcatcgaaaagcctctcttctgctgttggtcgtaccgcccctctaccacgttatcgacttcccgtctggctttgatttgctcccggttatccagtttgcctttctgcgtggcagtaatatacagaaaatccccggctgcacggtgagactgcttatcatcaccgaagaggttaaggacactcttgatgtccgatacttgctccgtatcgaaacggggcttgtaataatcccttgccagacggataatgccgtgtaccgccttgcggaagatgtcgcttgttttgagcagcaggaaactgagacagccgataatgtggttttgccacaaaatccgatttttgagcctcgtggtttcctccgtatgcgcagcctccttacggctaagttccgacaagttcttggcttccagctccatccgttcacggtgatggtcgttctgcatggtctgtattcgggtttgcagggcttcgatggcttccccgtgcgtggctacctctctgtgcagggcggcgttctcccgctccggcgtcttgaccttgttactgccgaaaagagaaccgacactctcggcgatgttggcggctgcggtcgtggctgcccctttcagcttctcggtctgtatctcttttttcgtccgtcttagttcctcctgcgccgtttctttctgacgctgcaaatccaccacctccgctttgaggctgtcggcgagtttcttcgtttcattgtaatactgctgcgtggacttgtgccgtgctttcgagccgtctatgcccctttgcagcccgtatttcgccatcgcctcggcgtaggtgtcttggtaggatttcagccttaggcgtgtcataatatcgtcggcgcacagcctcacggtgtcggtcggcttcttgcggtatcgcttcttcgcctgctcctcccttttcctgcgcttgcgctctcccttgacgatgggaacgagcgtgacgtgtatgtggggcgtttcctcgtcccgatgcaggtgcgccgccacgatgttctcctttccgaacgtgtcggcgaagtatttcatattgtcggcgcaccactcgtccaaacgcccctccctttcgatgcgttccatgtcctcgtgcgttcccgacacgttgattcggattgcccgtacttggttgtttccgattttgcgtgtcagccccgcttcttccagtcttctccggatagccgccgaacggtcttttatcccgtcggggtaggcaacgagttttcggttcaggtgcgtgcgtgtggggtctgcgttcttcggtatgatgaaacgctctatgtgggcggtcgttccgctgtcggaaccgtgcgccttttccatgtgcaatactacgaaacccatatatattcctttcttttttagcttgtgaaacaatgattctttgtatcttcgggggcggcaaagagccgtccccgacggggtgtgcagaggggcttgccccttgccttattggggaatttttcagcgatatggagtattgcggctcggaaaattccctaataagctacggtattttctccgtaaataccctgcggtgtgccggcggtctgcccgtgtcttatcggctcggcggttgaatccgctttgtgtacttggctgtctgcgctcgttgtgccgactttaccgactataccgaaccccatcttattatttttccctttcggtcgatggtgggcggcggggcggtcgtttccgttttcaaaggcttctttgctcggggcggtcggatgcaaggtttaggggaagaatctacccgaagcatgagggtggagattgttcccctaacggcgtagccgcccgaccttgcagccgacggaaagccccgtgcttgcttcgcctttgtaaacgggaatgactgttccgctttcctgcggtcgggaaacagcccctttctgtccgtgcgacggtatgaccgtatgaatgtatgaccgtgtgactgtattacggactgataccccgaccgactgaccgttacgccatccatcggcggctcggctcggtgtcggcaacgacagacacgataaccgtcgttttctcttttcgcccgttcataatcctgtctaataatagcttgcggactctcgccgccccgaacgattcgacacggaaagcgagggcggctatcgtttcgaggtcgtaaacctctatgctgcttctgtccgatagacggacaaggcgtttgatgccgtactctttcaataccccgctcttgcagagtgcctttatccctgcccgaaccgtcggggtgataaccccgaacagttcgcagatttcccactcggtcatggcggttgcgcctatgtcggtcggtagggagatattgccgtattcatctatcatgatgatgttcctttcttctttcatcggtatgctgttttaaggtgactaaatggctcggcagatgttcttctccatctcctctaacttgtgcgacaaggtttccatgtcttggcttatcttctgggcggtgattttggcgtatatctgcgtggtcttgatgttcgtgtgccccaacaggcggctcacggtttcgatgggtacgccgtgcgacagaagtacggtcgtggcgttcgtgtggcgggcaacatgataggtcaagcgcaccttgaaaccgcattgtctgcctatctctttgagtatcttgttgcaactgccgttgctcggaacggggaaaacatgaccgtcccttgcaagtcccttgtatttctcgatgatacgcttgggaacgtccaaaagacggatgttcgattcggtgttggttttcttccgtcgggtgattatccacaggttgccgtcgaagaatgtttgcaggcggtcggcggtgaggttcttcacgtccgagtacgccaaacccgtgaacacggaaaagacgaacaagtcccgtacgagttcatggtaggtgttcttcatcggtgcgtccatgagcgtctgtatctccttttgggtaaggtagcccctatcgacgctttcgggagagttgatgtaccctgcaaaggggttgaacggcagacgcccgtcgttcctcgctatggaaacgatgtgtttcagcacgatcatgtagccccacacggtattggtgcggcatttcttctccgtgcgcaggaaatactcgaagtcgttgatgaatgtaaggttgagttcctttagcggaatgtcctcacgcttgtaggtatggggcaggaactcccgaatgtggttgcagaccgtccgataacgggtgaatgtcccctgcgccctgctgtgcccgaccttcttggcgaactcggcgttgtgctgctcgaacagcttcagcaaggtttcctgcttgacgccgataccgagataggcgtctttgagcttggcggcggtaacatacccgtccgtctgcatcagttcttggtagcggcggtttacctccactcggattttatccaccgcgaggttgattctctgcgcttcgacgctcttgcccgaagcacggttgtttttcacgtcccacaaccgcaggggaacgtccatcttgcaactgaactgtttaatctctccgtccaccgtgaggcggcacatcaaaggcaggttgccgttcggcttctcgctgcctttcttcacgtaaaataagaccttgaatgtacttcgcataactcactcctttttttggttacaaaattagtttatagtgagttaccgacagctatgcagaattacgcaaatcgcagaaaaagaaccatttagcaagaaatctgcacccgttacgggggtaatgaggtggtaactgaacttctgcaccgtttggctgtatcgtggttttctttggcttttcgccaagagaaaaatatagcgtaacgaacgctatttcagctaattcgctacgctttactcaaatttgcaaatccgctatgtgtttattttaagcaaacaacgggaagacccggtcaactcagcgagggatttccgcaaaacagaagctttccttttcaaaaatcaggtatgaaaaagggcgcatccttttggatgcgccctgtgcaaatcatgccggcggcgaatttactcctggccgctgaaatcaggcgtgaggatcaggaactggtcgctgatgtccttgccccttctcttgggaatgaaggtatcctgaaggttgtcgttgtcgtccagttccagggtcttggcactctgggcagtcgtgaaaatcagaaccttgccgcggaagctttccgggtcaaaacgcacggcattgccagccacaacggtgctgccgtcttcaccaggaagcacggaagtgaccatcaggggatattcccccacggaacttccaatacccactttcttgttattgtcacccttgcgcatgacgtaggaaatacccacttcaccgggggtcagggcctgaccgtcgtaaatttcaccgttgggagtaacagtggaaccgccggaaggagtctgaaccttggcgtagaagttgctttcggaaacagactcattgcccagaagctgacggaaatagtcattggaagtatcgccctgaagtgcgcccaggccgctcatataattatgctgggcaacaacgcggtcggcagtgatgtcatcggggaaattgcccagtttgctgttggacttgaactcgttcatcgccacacccacgttcttcatgttggtcagggcctgcatctggtcgcctttgttgatctggttcaggataggaccataggccacggaagccagcagggcgataatggcaatgacaaccaagagttcaatcagggtaaaccccctgcgtaactggtgtgttgcaaaagatactttcattgttggatatgatggaatgtttacagtttaagaaaaccgtacgtggttatctatgttcgtttctactattaacgcgatttcccagtcaggacaagcatattctcataaaaatcttggtcctgcaaggagtgaaaactctgccgcagcccccctgcaaaaggcccggaaaataccgggccatggggaaaaatcctacctgccgctgccgaaaaaggaactcaacccttccaaagctccggcggacggcctgtcctcctcggcaatcacctgccgctggagttccgcgatctcttccagtcccttgcggcctaattccagcatccggcacatctgatccgccgtgaaaacggcctcttcaccggacccctgcacctccacaaactctccctggtcggtcatcaccagattcatatccacttccgcatccttatcctccacatagcagagatccagcagagcctctccctccagtattcccacggatacggcggaaaccagcctcttcatgggagactccgccagctttccttccgcgacaagcttgttcacggcaatggccagagctacggaagccccggtaatggaagcggtgcgggtaccgccatcagcctgtaaaacgtcgcaatccacccaaatcgtgcgctggccgatcttgcccagatccacggccgccctcagggaacggccgatcagacgctggatctcgctggaacgtccgtccagtttccccgccgtaatatcccggcgtttacggtcaagcgtggaatagggaagcatggaatactccgccgtcagccatcctccctccacacgctgaaccttcatccagcggggtacatcctcctcaatcgtaacggcgcaaatcaccttggtgcgtccgaaagtcaccagcacggaagccgtggcattcggggcgatacccgtttcaaagctgatcggacgcaactggtccacaagtcgtttatcctgacgttccatgcggggaatcatgacggataccgtcatctttttcaaatggaaagatggaattcccgttccaaaccgctaatatccctcccatgaaacaccctcgcacccgtgtggccgtcattgacgtggtggccctttcccgccagatgatggaacacatgccgcggctctccgcctgggcggaggggcggagcgtttcctccttccccccggcctttccggccctcacctgctctgcccagagcacctacgtgacagggctttccccgcgggagcacgccattcccggcaacggatggtacaaccggaacatgtgtgaaatccaattctggaagcagtccaacaagctggtgcagggcccgcgcctctgggagaaactgagggaacggtacggttccggcttcacctgcgccaaacttttctggtggtacaacatgtattccacggcggactggaccatcacgccgcgccccatgtacccggcagacggccgcaagatcttcgacatttacacccaacccatggaactccgggaaaccattaaaaaggatctgggagaattccccttccccaccttctggggccccatggcagggattcagtcctcccaatggatagcagactccgcccggtgggtggaacggaaacatcgccctgacctcagcctcatctatctgccctatctggactatgaccttcagaaattcggaccatcctcaacccaggctgcccatgcggcagaggctatggacggtcttctctgcgacttggtcgactttctggaacgggaaggcgtcacccccgtcgtcctcagtgaatacggtatttccgacgtatcccgcagcattgccctcaaccgcctcttccgggaacggggatggatcaccgtcaaaccggaaatgggtacggaaatgctggactgcggcgcctcccgcgcctttgccgtggcggaccaccagactgcccatatctacatcaatgatccttccgtaaaagaagaagtgaaagcactgctctccgccacacccggagtggaagaaatcagggaaacggacttctccggcctttcttccgcggctctggaacgcctgccggaattcaccgccgtcgcagccccggatgcatggttcacctactattactggctggatgacaccaaggcgccggacttcgcccgctgcgtggacatccaccgtaaacccggctatgaccccgcggaaatgttctttgatccgggccttaccctccccatgttccatgccgccgcctttctgctgaaaaaaaagctggggttccgcgccctgatgaaagttatccccctcaatggcgaccaggtgaaaggctcccatggcagagaccgggtgcctgcaaaccagcagcccgtattcatcggcccggccttcctgccggaaatccatgctgctgaggatgtccatcaagccatcctctccgtctttgaaaaagaataatagcggttcccctcagcgggcatccggacgggggtcatattccaggccgggaacctcccggtaatgaatgccgtcccacaggacgggaatgcagcagaaaaaccagcttctctggccgtcgtctcccttccagtgcccgaacacgctgcggatcaatacacggttcaaccccttgcggagcttgatctttacaggagggcggaaaaaatacccttcccaggtcagaggagcttcttcaatgcgcccctttccccaccccgtccagggcaggctcttgaaaggccacctgggagggttcacacgccttccgttcaaccatacgtccccgccggaaaaatcccagcttccctgttcaggggcgcgtgcgctgcggtacccgcctgaatgcccccacatgccgttcaggccaaacatcagccacacctcctgctccctggggctgcggatgaaagtcagagcatagcaggttccatcctcctttccaacctcccttgacatcagcgtgggccagtggtccgtccggtactggttccggtgcatgttgaacatcgcaaaaagatgcctgacatgtacggcggcgccgtaaacaggagtcttcttccaggccagtatcctgtctccgtccctgtaggaaggggctattcttctttccggttcaaaagaggtatcattcttcctccggtggttgaatggccccaccaggctccaggcaacatccgcctgtttcacataggcaaaaggaacgccttggaaaaaatgatcacgatggaaagccaaacgctgttcaaactcccggaattccttccagccgtccgttcccctggggggaagctgggccatataatccctcctcttggtagcgcttccgcgccagacacgctctgcaaacgtcaatgcacaaggataaaacggatactgttccagcacccgcctctcactgctcaggtttccgtcgcaccacacgggcatgatggcccccaacgccttatcatccccttgaggcacctcgcagggctgctggaaaaacacctggtacacgccggactgggaatccgcccagtcaatgtaaaaaccattgctgtcgatgcgcttcatattcttatccatcctggcgccggcctcgttctctccccagcacatcaatacggaatccttatcgtgcgggccgcccggagaccacacgaccacctccttgcccttcccgcggatatgctccgccatgcgtgggataaaatccttcatggaaatgtgcgcctcgtcggaccccatgtggaaaaacctcccgggaaacagggaaacggcctcgtccacgacatccttcaatatggaaacacctttctccgtctgcatgccggtcttcatggccctggcaaaaggctggctgtgtcccggcatgtcaatctccggaatcacctggatattcagccgggcgcaataatccgtcagatccttcaattgagcctgtgtataaaaccgccccgggagccgggacttccaatgaaaagccccatccgtcagggccggatacttcttcacttccagcctccatgcgggatcatccgtcaaatgaagatgcagcgtattaatcttatagcgggaaagacggcgcatcacatccttgatcaaggcaggagacatataataacgccccacatccagcataattccccgcaggacgaaagcgggtttgtcactaatacgcacaacaggcatggcaaattccccttctctattgaaaaccagttgccgcagcgtttgaagggcgttaaaaaaaccgccaaaacttcctgccctgacggttgcttttcccaatccgacggacaggtcatacccctctcctttcatcctggcgtccggaaacaattcccatgtcatggcaccttcagcagcccccccactattcagggaaccctgaatgccggaagtcctgaatatgtccttgatctccttcatcaaatcatccctgccaggaacatccgaaccaaccttcacatgaacgctcctgaaacctgcctcgcccgcgcccctgacgactttggaaggatatggaataagcgcgggggaagaaaactccggcacaggcgcggtaaccacccctccggccagcggcccccatgaaaaataaatcagcaaggcaataaaaaaccgtacgggaatgctgaacactctgaacaaaagcattccttaactacggcattccatctccgctcctgtcaaaacagggctttctcaactgggaaaccaaatgcttttcccatcctctccaacaccgacatgcttattcctccatatcgctgtttccctccgcaaatccggcaataacgaacgggcgtcttcgctatcgtcccgttcattcgccagacagactcctccagtcagtgcaaacgttccagcaggacgtccatgtccatgtaatcctgcccgtgaatcaattcgccgagaatgggcgcatcggaaaactcctccaccatgctcctgttcgtcacgcaggcagtatcccattcatctttcacattattgaacacgatgcccaggcattccaggccgcgttccttgattgcattcagcgttaacagggcatggttgatggctcccagcttgttgccgatcaccagaagaacaggcagcttgaaatccgcagccatatcgctgaaattccttccggggccaatcgggacttcccatcctcccaccccttccaccaccacgcactcatgtgcggcggacaaagcgtcataagcccgcaggataaccttttcatccactttcgtattctccagccgtgcggccacataaggacacgtggcattcctcaaaaaaacgggattcagttcatccagcgtcagatccttcggcccggcttcgcgcaaaaggcgggcatcctgcctgtctccgcaggccacgggtttgaacccggcggcattgatgcccgcttctcttagagatttgacgatcaggcagctcacataagttttaccgacttccgtatcggtaccggtaacaatgaaattcctcataacggtaaatattcagggatgggatcttctaatctcctcaagctgcccgcgggaaggcacgccgtcattcgtggtcacccagtgattgatgaaagaccagataatcacggccagcaccagacagaacaacttggcaggccaattaagcaatagcagttttttcattggaagaagaaatattcagcagctcttcaaggcgtcccttcaactgttccggagtcaggttgcgttccagcttcccgcctacggccaacgcgatagcccccgtctcctcggacaccaccaccaccacgcagtcgctctcctcggacatgcccacgcccgcgcggtggcgcagccccaaggtacggtcgctcatttccttctgggaaacagggaacacgcaggcagccgcagaaatgcggtcgccggaaatcaccacgcccccatcgtggagagccgtcttggtatggaaaatcgtcagggccagttccggagaaaaaatggcgtccagcttcacgccggaatcctcaataggcttcatgctgatgctcctctcaaaagcgaacagggcgccgaaccgctggttggaaagcttgcttaccgccttgcagaaattatccaggaaatccacccgctgaagcttggcgaaggaagaaaaaaacgggtggcttcccagctttgccagccccacgcgcagctccggctggaaaatcaccaccagagccagcgccaggccgggggcgaaaatgcgcgtcagtatccacgaaataacattcagctgaaagaaaaaggccagcaccaccagggccagaaagcaggcgaacagccccaccatgatgcgcgcgccgcgcgttgcgtggaaagcacggtaaatctggtacaggaacacccacaggatgaaaatttcaacaaccgcccggagcgcatccttgatcacaatccagtcccacatgcccaacaggctacacaacaacccggccgaatgcaataccgatcctctcgcgttgccggcaggctccgggaatttaccgttcatctcagttcccgaatttgaagacatctctgtacgttccggagacagatagaagttcttaaaaagaagagcagttctttggaaaataaataataacaataaataaaaattggattaaataaacaatgttaatccgcataaagcaaggcttcagaaaactgaaattctctctggatttacggcatgaacttgcggcggatacactgaaaaaccaaacaaaaaataatcaccagatgatagcaatcgaacaattaaaagaagtagggaaaatctggctcgcctgggtaaggcttcaggatcatgatcctgccgaagtcacgcaaatatttgaaaaacttaaaggagaactggatgtaaaattaggaagaggctggcaaaaatatgacccggtaataaaaaaaggaaggccccaatcctataaaaaactctttcaagaattggatagtgacagtcaggaatccgcaaatgcattgatcaaatatttcaatgagggaatcccggaagacgctcctgtctcgccagtcatacacctcattctcatcttatgcgtctgtgaagtaggacgtggatatggccaggcgccggacaatatgctggcttatgcacatgatctcattgattatcccaatctcacatggagctcactgctggacacagcgggaagttccccggagttcgcatttctatgcaagggtgattccgatgaagactataaggaataatgcatgagcaccgtccgcaaccgactcaccggtgagcctcccgcacggcatgggttccctgtatccgggcacagggaacttcacccccatcgtcggcaaaagggacagccgcaggcgggctcgggcaattcagaaacataggcggcccttcctgccttccatctgtctcaatcctgcggacatcaaaagttggtgcatcaacttttctcatcacctcaatttccgggccaaaaacctggccgccgtcatgataacggacaccttccttttccggaaaccgaactgccatcaacaggaaaccttccggaaacgctggattaccgccgcatggggcagatgccccagagcggcaccaggccgtcctgcatctgacggcgggcatcaaataaaacgcaggcggcccctgcgcccggcagcctcagacggcctgcccgtccataatcgtaataatgcggtcccctctccgtgccagatgttcgtcatgcgtcacaatcaccagcgttttgcgggactcgtccgccaggccgaacaaaaggtccagcacctccgcgccgttcttccggtccaggttcccggtaggttcatccgcaaaaataatgggggcgtcgttcgccagggcacgggcgattgccacgcgctgctgttccccgccgctcagttcgctgggcaggtggttcaggcggtgggacaaacccacgcgctccatcagttccctcacatattccacgcgcggcctcctgccgatggaggaagccagacaggcgttttccagcgccgtcaattccggcatcaacagataattctggaaaataaaccccatgctccggttccggaacacggaccgggccgtggcggacaaggcgtaaatatccgtgccgtcaatcgtgacctttccctcttgcggcgtttccaagccggccagcgtgtacatcagcgtggtctttccggccccgctgggcccgcacaggaacaccttctctccggcggcaatgtgcaaatccaccccatgcaggatctcaatggacttcttgccgatggaatagctgcggtggaggttggaggcggtaatcacgggcgcagtataagaaaatccttgccgtattaaagttctatgttgtctataagacgcacgtcgccgaaatagacggcggcggccatcagggccggcttccggttctccgccagcggctgcatggtctccgcatccacaatctccagataatcgatgcgcgtgccgggcacaccctcaatcatggcggcggcatgctccttcaccttggaggcgtccgccccggcctggaactcgtcccgggcctgaagcatagcctgccgtattaccacggcctgttccttctgctccggcgtcaggcggacgttccgggaggaataggccagaccgttgccatgccttacaatctccgccccgtgaatgcgcaccggaaaatccaggtcgcgcaccatgcggcggataatggcaagctgctggtaatccttctttccgaaaatggcgtccgtgggctgtactaggttgaacagtttggcaagcaccgtgcagacaccggaaaaatgccccgggcgagacgcaccgcacaatgttgcggacaaaaagctttcttccacggcaatgctgcgttctccggaatacatttcttcaggagcaggggaaaacacataatccacgcctgcaccttcgcacacctccaaatccttttcaggagtccggggataagtctgaaggtcggaggaattgttaaactggataggattgacgaaaatactggcaaccaccacgccatcctccccggccaacttgcgcgcctgttccagcaaagcgcggtgtccggcgtggagggcccccattgtggggacgagaaccacatggtcatgtttgcggtggtgcttgaggagggcagccctcaactgggccttggtggaaaatgtttgcatgcgcctaaagtggccccttgatgacaaaagttcaatcctgaaatattgctagaaggttgacgcatgccattccacatgtaaactggtaaagtcagaagacgctaaaaattatgagattcttcaaaacagcattaggtgtatcagcagcaatggcattaagcgccacggccaacgctgaacttaaggtagcgacggtggatgtgcagaaactcttcgccgactactacaagacccatgaagcccaggcggaagtagacaaggctgcccagacggtgcaggaaaccaacaacacccgcgcggaaaccatcaaaaagatggaagcggacttcaacgacatggtcaaaaggcttcaggatcccatgctgaatgaaaaggacaaaaaggagctggagcaaaaggcccagatcaagcgtcaggaagtcattgcgctggaacaggaacgccgcggatttgtggaacgccagcttaaatcccttcaggaacaaatgaaagtgcgttccgccaaaatcatgggagaaatcacaaaaatcacggaaggcatcgccaccaagggcaactatgacctcgttctggacaaaagcgcccaggcccttcggtccaaccaggtattcgtctacacgaagcccggcatggacattactcccacagtgatgaaagaactcaacaaagacgcccccgaagggtttgacccctccaagaaaaaggctccggccgtccccgccgctcccgcggccccggccaactaacccttgacattacccccgggaaggcggaatcatatacccatgaagcttacacttgaagccgtggccgccctcaccgggggaaaaatcctttccggcgaccccgaactgaccgtattcggggtcgcttcccttcttgacgcatcccgtgaagaagcctccttccttggcaatgaaaaatacttccaggacttcctgcacacctctgccggaatcgtgctggtgccgccgggcctgcctgcgtatccggaacacgcagctttcgtggaagtggacaacccctccatggcattcaacgccctggtgaaatatttcatggcttccgcctaccggttcacccccggcattcatcccacagccatcatcgaccccacggccagcttcaacccggacaaaatccatgtaggagcctatacctgcatcggggcccactgcataatcggagacgggacggacattggcaacggctgcgatatcggagacggcgtcaccatgggggaaaactgccgcctgcatgcccatgttaccatcagggaacgctgcaaactcggcaacagggtgaccatccagcccggagccgtcatcggttccgacggattcggcttcctgatgggagacaatggacgctacgtgggcattgaccaggtaggcattgtggaactgggggatgacgtggacgtaggggccaacaccactattgaccgcgccagattcgggcgcaccattgtgggggaaggcaccaaaatagacaacctgatccagctcggccataacgtcgttgtcggcaggcattgcatcatcgtcgcccaatccggcatagccggcagcaccaaagtgggggattatgccaccatcgccgcccaggtcggcatctcaggacacctcaacatcggttccaaatccacgctgggcgctaaaacgggagtcctctcggacattccggaaaactctacttactggggcatgccggctttcccctacaaggacgctacccgccaatacgccgccctcaaaaaacttccggcactgattaaggaagtccgcgcgctcaaaaaggagctggattcttccggcaaataacgggcaccatatcgccggaacgctctgcagcccctctccgtgtttctgtttcccgccgcttcaggcctgtcctgtcccccagcggcggtgcagaaaccgttccagaggagaaaacagaatcttgtcggacagtagcccaatcaccacaatcacgaacatgatgcctacgacctggttcatcgcgttcagttcgcggccgaaatgcagcagctggcccaatccgaacccggtcaggatgggaacaaaaatttccgcagccatcagggagcgccaggcaaaagcccatccctgcttcattccgctcaccacaaacggggcggaagcgggaagcgtcacatgaatcaggcaataaatgggtcctgctcccatggtgcgcgccgcacgggcataaatgggcggcacgttccgcatgccgttggccgtagccaggattacggaccacagcgtccccataatcaccacgaacagcatagccccttccgtctggccgaaccacagggttgccaacggaacccagcacacgctgggcagagcctggaaccccagggaaaccagccccagagtattctgtataagctggaaacgggagcacagcatgcccaggggaatccccgtcaccaggccgattccataccccagcaccagccttttcatggtaatccatgaagcctcctccagagacccgtcctgaaatgaagagcgcagatactcccatacttccagcggagagggaaacaaataaggcttccagaccctcaggtcgctcaaatactgccatgcccagaccacgaaaatgaaaaacacgagcgaacaggcgtgcgccccccacttggaccatttgttcctgttcatgctgtggctcctttcaaatcacgggtaatgcgggaggacaatgccgccaaatcactgctgttgatatccctgggatgagggaaatccacgaaatattcctcacagacgcgccccggatgcggagtgagcaacaccacgcgatcccccaggcacacggcctcgcgcatattatgcgtaacgaaaacaatcgtcatgccgcagcgtaaatgaatctcctgaatatcctgataaagctgttcgcgggtcatggcgtccagggcggcaaaaggctcgtccatcagcaaaatgcgggggctggtagccagggcgcgggcaagcgccacgcgctgcttcattccgccggaaagttcatgaatatgagcatgggcacactctttcagccccaccagttccagattcttctccgccatggcaagccggtctccccgagtcagtccgggcaccagattcaagccgaacatcacgttccccatcacatccagccacggaaacagggcggactcctggaacatcacagtgcggtcccgtccgggtcccgtcacaggctccccgtccagctccaccaccccggaagaaggaaactccagccctgcaatgatattcagcagggaagtcttcccgcagccgctggcccccaccaggcacacgaactcgcctcctctgatattcaaattaatgccctccagagccaccacctttccgcgcctcccgtcaaacaccttgctcacgccggcaatacggagcttgcagcctccggggccgcaatgttctgcacccgcaatcatcttccgcccgcctccttcgccatggtcaactgttcctccgccgcctccggcaccaccaggccgcctatatccggaacctctttcataaatccggcctgatgggcgtcctgcacaaactgccggagcttgggaatggaaatcctgtccttgatgacaatgcttttccaggcctccgcaatcaatgccgggtctattctggaatgcgtcagctcctccagctccctgaccacgattgactgggcctcatccggatgcagccttatccattcgttcagttcctcatgcgcctgcaccagggcttttgccacctccggcttttccctgagaaactccgctccgcataccagtacggtcgcgatggactccttctcgtccaccagcaccctgcctcccgccgtcagcaccaggcggctcacccagggttccaccgtccacacgccgtccagcttgccctgccggaacaggctgagctgttcggggttgggagtcggcagaatcgtcacgtccccgccgcgctgcgtcacatgcaggccgccgcgggaaaaccaggcgcgggcggaaacatcctgcgtattccccagttggggagtagcaatcaccttgccgcggaaatccgcaggctccttcagcgaggaatccttcggaaccaccagggcggcgcctccttccacagctccggcaatcatcctgatatcctccccgcgggaacgcacaaacgcattgatggccgggctgggccccacataagccagttcaatggaccgggcgaacacggcttccatggcgctggggcccgcattgtacacgtaccagttgatcctgacatcctttccggtagcctcctttagacgttcttcaaaccaccccttcccctgccgggaaaaatgatgcgccaccaggccctgcacatgtgtcacgttgggaaaatgaccgaagttcaactccacgacgttggaatcttccttctccttctttccgcaggaaacagccagcaggcagaaaaacagggccggtaaaatcgtcaggaatctggaacgggacataagcaaaaagaatgggatactgaggcacagccgtttttccgcggcctttcaggcaccgactagcagaagaagccgccggaggcaagaagccgaaggcaacaactttgtcacaatgtggacagcaaaaatgcccgttttgttgaaaaacaatcccggttccggatctgaaccgggctttattgacaaacctgcacgttcccgttacaaaagcaccattcccaacccgccatgcaatcctcccctgaccagccctcatccggagcatggctgggccttcctccggatgaagaacgcccggtaagccggggcgccaggtaccgttgcatctttctgatgctcctgtactgggccgttctttccgctattccacaaggcgcagaccgccttgcagaaataggaacaaatctccctctctggatgggagccctggaactgactcccttcctgctggtgccggccttcctgttcctggcggtgcgaacaggcacccaatggagggccttgatgataaccgtatatgcgggactgttcctgaacctgctgatgaacatggcgcttccctcaggcgccatatggggcgaccttcccgcagccggcccctatggtacgcttgtctggcccggaggggaccaccgggaatggctggtcacgctgccccgttttccccaattctgggctctcgtcatctatgtcttcctctccggcagcggaaccccgcccctgcttcgcctgctggccctggcctggtggttcctgctttgcgtggcccccgtgaacacgggcatggtggggtatgcggacatcctggggcctctggtcatcatcgccctcgtcctcggctgcatgcacctggcggaaaaaagagcctcccggcaaaccaagggctaaaaatccagggcggccattccacggaagaaacagctgccccaggaccggcggacaccacccggtggaaaacttcccggcgccatccgttatttccagattacttcaaaaatatttacggaacttcccttcttcccggtcaggccgagggccttcaccggttttttgacggatttcaggctgaacgtattcactttcctgcccttggccagattgcccacgggaacccaccgtccgtcagccccacaggccagcacggaagcctccttcccgtcggacaggacaatgacggaacccgcacggggaaaatcacagggaatctccaccctctccggagacagctccaccgggaggaacgttgccaggttgaaatccccggcagctccgctgtcggcgaacttcccacccttgttggcaagattcagccggaactcttccagagtcacctcctgcggggaggaggaggcgttcaacagcctgatgcccttgatcactccgccaatatccgcggaaccgtcctccttcaacggaacctccgcccaggactttccatccatggaaatgaacaacttggcccacttcatatccggcgtcttcaaattgacggaggcggactccacggacgctcccgccggaatttgaaggcccagggactttttcggcggcaggggatgcacctccatgatgcgcttcaaggaaatatccctgtctcctgcttcaaccacggcattcctgaacgcgggagcatccgtcagtacggaaggcgctgcaggagcattcaccttgaaatcccggatggccgtccacacgtccggcttgcctcccggaaccccctgcgccgtagcgcggtaacgcacaaaccggccttttttgccatttccccggtactccacgcgaagcccgctggactccggcatcaggggagaccaggactgcccgtccagggaaacctccaactgtcccctgttcacagcgtccgtatcggaatcattgcggcccatcacaatggaaacggtgcgtatctcccgtggaactcccaggtccacgccgaaaaagtcacccttcttctgaacctctttgcagtaatagaacgactcggggtcgtcatccagcatcttctcgatgccaatcttggacttggtggaaacataaggcttcacacggccaacggcctgcccgctcacgcgggaaagcacgggggtggagcccatgtccagcagttcccgcacagcgggggccatcaccagttcggacggcttcacggcggtttgccacggggaattcttcttggtcacttccgtgacgtgcttattgatggccttgctgatttccctgctgtaacgctgcatctcggcaagcaggcaggcggcctccatagcatgattcaacgctccggcggcattccccacctctgtggcctcaatcatgcgcatactgttcaccccggctttccccagggattcgaactggatgagccacggctccacctctgcaacgaaagcggggttattagacttggcccgaatcgcggccggagcttgggctatcttcgcgaactcggccttcaggcgatcaaacgccttgcttccagacaccctggccccgcggcggcacagctccagcacctgctccaccacgggggcaatctctacggactcctctttgcggtaattgtgcccgctgggccccccgtcgctattatgatcggcaaacgtctgcatggcggaggagcagccggggaacaaaatacggatactgtccttccatgtcctgtcggaatcataggccttggcgttccaggtcatgttcgccacgctgaacagggaaatcttggaagcctccggcttatccatcggattggaagcaaacccctgcataaacggcatcgcgtccgcatccacgccataggtgcgccccaaaaacagggcatggcgcacgtaatccgtcaccgggaaattccaccagataaacgccggacgcttcaaatacttattaatccccttcaaagcaggagtccggatatcgctcacaatgctggaaccggtccacatgatgcctatatccttgtccagatgttcccccattacctcatggtagcggctaccaccgccggaatacgccgtggggcatacgatcaacggcgtcacatccggttttttgtggataaactccttattcaggtaattcaaaaactccacctggccctccggtttggccccctctccgccgatgtcgtcaaaaaatacggcaaaggaacggaatcccagatcatacatcatctcaaacttcttcacggccgccttccggtccgcctcgccccagcgaatatccgctccgggatgcacggcccagacaaaattcaccttattctgcttcgcgaccttcaccagctctttcaggtccttcgccatatctgcgggataaggctcgcgccagcgcttggaaaaaccgtggaacacgtcatccttcgggccgtagatgtaagtattcatcttatacttcccgtaaaatttgaactggctgatgcgaccttcctgcccccagggcagaccgtaaaacccttcaatggtaccgcggaaaggaacatccggccaatccaggacctccacttccggcaccgtcacgccggaagaagtcttctccgccaactgcagcagcgtctgggccgcgtaaaacaggccttcgtcgtcataccccgtcatccgtattccctggggcgtaacgctcagggaataggccccggccttccggggaacattaccggcaggctttttgcttcctttgatgatagtcatctgcacaggcagcccgtttggagcgagggaaaacatgcttttcagggcattcacggtaggttcatcccgcgcgcccaacagcttcagggccggaaccgtcacggaaccgccgctcctggtcatcttctgcggaatgggatacaccggcatcttggccgtttttccggcacgggagccttcaggagaggcggaaaaagccggagaagaagactgggcagaaacaggaagggccaggccggcccccagcgcggcggcagccatcatggattggaaaagtatcagattcatacgtgcaaaaataaaaagcctgtacaggccaggttcacgaaactacggccggattgttccacttctaacaggctcctctccgtatgtcaaaatactttgccccgcaccggtaccatgtcgcccgccccgctgcaggggataactccagggacaaaccgcagcgacttttcccgggcaactattcccggcctacagccttgccgccacttcctccaacgtctccacacgggccgtggcgagggtggggacatcttccgcagaaaacaggaaattgcggcctactccggcggcaagagccgcccggatgtcccgctcccggtcacctacggacacgcaggccttcatatccagcccatgcgcggcggcagccttcaaaaacaggccgggattcggtttccggtcgggatgtccgtcatccgcgctgggacagtgaaacacacctgcaatctccgcaccggacgaacggaacacccctctcatatattccgtcaaccgctcaaagtcatcttcagaaaacatgccgcgtcctatgccggactggttggtcgccaccagcaccagataccccttctctttagcctggcggcaaagattcagaattccgggaaccagccggaagtcctctatgcggtgtacatacccgccatccacattaaccacgccgtccctgtccagaaacaaagccttacccgccatatatctcccgttcaaccagttcgcaaaccagatgccccactgcaatgtgcatctcctgaatgttgttcgtggcatcggaaggaacggcaatgcaaaactccgcaacttttttcatctctccgcctccgcggcctgtcaaggccaccgtccggacgcccatctggcgcgccagctccatcgccaaaacgatgttccggctgttgccgctcgtggaaagccccaccagcagatctccgggacggcccactccctccagctgcctggaaaacaccgtctcataaccgtaatcattgcccacggcggtcaggatggaagtatccaccgtcagggccagcgcattcatggcggggcggttcagcttgtaacgccccaccaattcggcggccaggtgctgggaatccgcagcggagcctccgttgccgcagaacatgatcttattcccggccttaagggtatccgtacaaatgcgggcaacctgctcaatatccccggccatggaagccagggctttgaaattgtccgctatccctaaaatctggttcctgatgtattcgctcattccgggctgcttttcatgcggttgatgatattggtggaggaaaaaccctccaggcggggcagttcaagagcctgccctccataagatttcacgaactgtccttccggccagcattccaggggatacccttctttggcaatcacgtccggacgcagcttctcaatcagcggcagagccgtatcttcatcaaacggcactacataatcgacaaaatccagggatgccagcagcagggaacgcatctcctcattattaataggcctgtcctcgcccttcagccgcttgatggaggcgtccgtattcaaccctacgaaaagcacgtcgcacgcttcacgcgccttcataaaggaatgcagatgccccaggtggagcaaatcaaaacaaccgtttgtaaatccaaccaccttcttctcacggcggaaacgttccgccagctccgccgcggcctccggcgtcaggatattgtcgcggtgacgccaggagggtgtctggatatccttctccttcaacgcctccttcaattccgttccggtcacgctggccgttccgaacttgcccactacgatgccggcggccacattggacacgaccagagcatccggcaccgcggctccggcggccagcgccgcgcccagactggcgagggaggtatcacccgcgccggacacgtcaaaaacatcccgggcctccgtaggaatgcagacaaaatcggaagggctggaggaaggaatgaaaatcatgccgtgttcgctcaaagtgacaatcagattctcaatgccgaattcggaaaacagcctctgcgcccccgccacggcatcctgttcccacccgtccatggcaggattgagcgccacgccggtagcctcctggaactccttcatattgggtttcaccagcgtggcccgcctgtagcgggaataatccgctcccttcgggtccacaatgacgggcttgcgcgccgcacggcaccgggcaatcacatccggggcggttcgtccgtcaaacaggcctttcccgtaatcggacaaaaggacaagatccgcctccggcaaacaggcatccactcgttcaaaaaaacgggaagccagctccggctccatcctcagcggctgttcctggtccgctctcagcaaatggtgcttgcccgccacaaaacggatcttcacggtcgtctcatacccttcgcactccaccagctccggaacgcagtgcgtctcttccagaaaacgccttacctgccgcccatggccatcatccccgaccacgctgataaaagtggtgcggcatcccagcgcgcacagattggacacgacattgcccgcgcctcccagcatgcgcgtctcccggtccatcttcatgatgggaaccggagcctccggcgaaatacggctgacgctcccatacaggaacttatctagcatcacgtccccgatgcagagaatccgcacccgggaaaatccgtcaatcaatgtatgcagccggttcatgggagacgcctctttctaccacgccccctgttataaggcaaggacagttgaaccgcgctccggaaccggaaaacggggcaacgcagccgcttcccgccgttccggacggcagaactctcattcagtggcaaaaaataggtcagtcatgataaaaatcttgacctgtaagcaggaaagcactacctattgtctcccgttcccggacgaatagaaaaaggaaaacaaatcatgcgtgaagttaccgtaagaaaaggtgaacctatcgaccgcgctctcaagcgcctcaaaacaaaactggatgttgaaggcattctggatgaaatgcgccgccgccgcgcctttgaaaccccgatggacgaacgccgccgcaaggcccgttccgccagcaagcgcaacaaggtaaaatggcgttacagcaacaagagcgaagaaaccgcttccgaaactgctgaaacacccgcttccgctcctgaagcttaaaacagtattagttcgggaataagaacccaatttccatgagggcaaccctttctcaaggattgccctttttgcttccctctgcacatgaatcagtcagcccagctcttctcccgcgcacgctccgttatccccggcggagtcaactcccccgtcagggccttccgcaatgtggacggggaccccttctttgttcaatccgccaaaggagcctacatcacggatgcggacgggcgccagcttattgactacataggcacatggggcccggccattctgggccacgctccgcaacccgttctggacgcagtacatgccgccgtggacagggggctgggctatggaattcctgcgccggcggaagtggatatggcggaaatgatcacggacatggttccctccgtggaaaaagtgcgcatggtcaactccggaacggaagcaaccatgtccgccatcaggctggctcgcggctataccggacgccgtaaaatcattaaattcatcggctgctaccacggccatgtagactcccttctggtggcggcgggttccggagcgctcaccttcggagaaccggacagcgcgggcgtgcccagggaaatgacgcagctcaccctcaccgtgccctacaatgaccgggaagcagtaaaaaaagcctttgaactccatggaagcgacattgccgccgtcatcctggaaccctttcctgccaatgccgggctctactttccgcaaaacgacttccttcacttcctgcgggaaataacgctccgccacgacacccttctcatctttgatgaagtcatgacgggcttccgggtcgctcccggaggcgtgcagcagctttacggcatcactccagaccttacctgcatgggcaaagtcatcggcggaggcctccccgtgggagcttttggcggccgttcggaaatcatggactgcctttctccgcttggccccgtgtatcaggcgggaaccctgtccggcaatcccgttgccatggcggcgggattggcccagctccgggaactcctgaaagggaacgcctatgaacgcctggaacagctcggagcacgcatggaagaaggcatccgcgaagccctcaaaaaacacggcagaaattacaccttccaccgtgcgggctccatgttctgcctcttcttcacggaagaggaagtctataatctggaatccgcgcaaaaagcttccaaaaaactcttcaaatccttcttctggaacatgctagaacaaggcgtctacttcgcgccttccccgtacgaaacgggctttatctctacagcccatacggaagaagacattgaccgcacggtggaagctgtccgcatcagtctctccaggctgggttgacatgcccctgatttgaagtgacagctcacggcccttcccctataaggacttcatgagacaaatgacaggaaccatgctgcttctgtcctcagcagtcgttatggccgctccctgggcgcatgcggaggaaaagacaatccagctcacggaagcggaacaacaggaaatcaagacggcaaacgaaaagctgctgggccttaccctccgtttcctgcatgactcatggccgctggaaatcatgtttcccggagaagtgcaggaggaattccactccattcttcaatgccatcagatgctggagcaattccgccaaaccggcaacctcctgctccagacgccggaccgtaccacgcctctgcacctctgcattgccctgggattaaaccggctggccgtccggatggtagaagcgggcgctcccgtcaatgctcaatccattttcatgcatgacggcacaaaagagccgggagacaccccccttacctgggcgtgcctctcaggcctctatatgaattccaccgcggaagaaaggctgccgctggtgcacgccctgctcaaacacggcgccgatccggatcagccggggccttggggcgtcaccccgttcatgtattccgccgccctcaatgactccgatccgggtcaggaaaaaatagcgctggcgctcctggacgccggctccccggatctcaagcgcagaatgaacgctcaggcgcgcggagtcggcttcctcagtctgtcccccgccatttacgaacggctcatcaaagccggctgcgatgttaacgaacgcttttttgaaagcaagcaatcacccctccacctggtctgcaccaaggaaaaaccggcggaacgcctcattcctctcattgaacttctcatcaacgcgggagcggatcccaaccagccggacgtggatggcctgactccgctgatggcctgcaactctccggaaatagccgtttgcctcatgaatcacggcgccaatccctctctccgcaacgatgacggccagacagcctatgacttccatatgaaaaacgggtatccccccattgcggaagccatcaagcactggcagtccaagcagaaaaaaggggaaacccgctaaatagcggacgccatcgcaggctttgcagccctccttctcccactggtgcgggaaagaaaagcggataccgtcacggcccgggaacaggcggccggaaccctctccccggaacagccgtgcttccgaagccatgcaggcagcccaccctgtttcctgttataaaaaagccgcttccccaattcaggggaagcggccttgaaaaccacaggaagaaagaattattcctccgcttctatgccttcgccgatcatcttgggatcttccggcatcttgcctgttgtgaagtaaccttcaatttcctccagggaacgtcccttggtttcaggcaggaagaaggtcaccgtaatgaaatacagcaccgtaatgccgcccagcgtaaagaacacgccggaataaccgcagctgcccacccacgggaggaaggaaccggcgataaccgtagaaaccagctggttgatcaacagagcaatcgccataccgttggagcggatgcgggctggcatcagctcggacagcgccagccagacgcatacgccggggccggtggcataaaaagcaatgaagataatgaagaacgcagtcacgccccagcccatggaggtatccggcttttcgcccaattccgccttcagaatggaaacgggcttcatggcatagccgtccttgccgttcaccaccattttattggtggaatccggaacggccttgatcacggccagggaagccctgtcctcttccttcttgatatccttggtatccttggtcagttcggaaaactctacgacggaaagctgggtggaagaccccatcaggaactggtaccaggcgggattggcttccggctggtcataggtgatgatgagctgcatcctgttgatgtccttgtcggccatgccgttcttggcaagaagattcctgatgaagggggaatccggagtgcgttccaattgaagcgttcggatggaacccacatccttgccctgttcaaactccttctggacggaagggctctgggcggccagcagggcagccacatccgcagtcacatccttgcgggctttttccacattattgaacaggaacccggtgccaagaaggccgaccacgatgccggccgttccgattttaagcaggaacttgcggcccttgcggtccaccagcaccatggcgacaatagtcatcaagcagttcacgaccttgatggtaaagtctgcccagttggcggtggtgccttccaggcctgcctgctgaaataccttcacggaataattcagcacggaattaatgcccgtagcctgcgtaaacgccagaacgagcaccgccagaacaaagggatagatatacttgcgctgaagaagggactcgccggaagaactctgctttttgagttcctccgccttctgcttctcttcctcttcaatatgaaccatttcatcaaacacttccttggcgcgggcatccccgtaactgcgcaccagcacagccatggcttcatccttgcggccgcggcggaacaggtagcggggagattcgctcaaacggaaggaaccgaaaaacaggaacaggccgggaatggcgcaaacccagaaaatagcctgccaggccagaaccttggcggaagtcagcgattcttcgctcgcgccggaattctcgacgccgcccacataactggcggcaagcaaaccgacgacggcggcaaacaccaggcccaccgtcagcaggaactggaacatccccgttcccttgccgcgggactcggcgctcaggcactcggccagatacagcggaacgaccacgcccacaataccggcgctggcgccctgaagaatacggcccagcaacataatgccgaatacttcctgggacaggcagatcacggggatgctcgccgtgaacaaggctgcggccacggtaatcaacgccttgcgtcccatcttatcggccagatagcccgcaaacagggaagaaagaacgctgccgaacagcacggcggccaccacctgggaaagctgggagggattaaaaccggccgtctgctcaatgtagggaagcgcggcagcaatcacgccaacgtccacaccgtagagcaggccgcccaaaccggccatgatgaggagatagcgcatatatcgcctggccgcatccggaacggcggctttcatgttttcttggtctgtcatggtcgttgcattctagtaaattggctcttctccgcaaccaaaaaaagacgcttctcgggcaaaaacaaatttcctccccggaaatgcgttcaaatgatgaaaatatcgcaaaagaaacaagtaacaaactgtccgggaacaggaaatcatttggacacctctgcagaaaagccctcatgcatcccccggttccgaaaaacagccatgggaaaattccggagccgcacttcaattaccgtaacaatccccgtaaaccgtccggaaaaaaaactccccttccgtattgaagccagaaaaacagcgcgatgcgccatcacggaaacggaagccgcccttaccggcctcctttggcggaagaatctatcccaagccgcttttcaatcaggttcacagacaactccgcgcacaggcgcaattcgttatcggcgtcatgagtgaaagccttaagcgcggacagggaagcttccgaaccgatttccccaagaattcgggcggcggaacgtttcaacacaaaatcgtccgactcattcagcgaacggatgatatcagcttctcccgttgggccggcagccttgcattcgtcctcccacttctggggatcctttttccattcccccagaagcaacgccaaacttctcttttccgaaccatgcagtaaaaacctgatcagagacgccgggatttcgcaatccgccttcttcagctccgtagccacgtaatcaaccacgcgctgagcctcctcatgatccggttccgcccataccacaagggccgaagccaacgcggtcacatattccgcatcacgcccccacggttcccggagaagctccaccagcctggaagaaacctcaccccgcatcttatccggatttacagccgacaaacgttttgcggcggcaataacgcggcggatgtccagacaggacagctccttcaaattggccagcacgaaatactggtggcgctcatcctgcaacgcggcggaagcgggccgcgcttcaaacctgtcccggttcagaatcacttccacaaaaaaacgctccttatcctgcagggacaccttccccatcttgcccgcaacctctacaaattccttaaacgtaatgggagtgggagtaataacgaacagcccgccgcccgttcccttgcggtcataaaaaataggttcgtcctcggactgggtcatcctcttcaaatatgcctttaccatatcccggttggctgcattcaccccaaccacccatacgcccagaaccccctgggattccttgcggtcaatagcggaaaacagaggtttcaaatcaccggccccataattctggacagaagcgttcttggagggcagctgctccagccccatgctggtaaagccggagacatcttcttcctcggcgctcccctcttcatgccccccgagcagggagggattcaccttgaccggatacacgaaaggcagggaagcaatcccccctgcaaccagcaaacccagcaaaatgaaaacaatcttgtgcctgcgtccggcacaggccatcaagcctccggcaagacaggcaaaaaacagggcaaacgccttctgctggggctgctgcagcatggaaagaaaaaaggttccatccatctcggaagaagcattgtaaaaaatccagacgcagccggcggcaacagccagggacgcgcaaaggcacaccaattggatcagccccgtttccaccagagcgctctgaatggcttccctcctgtctttgggggaatggacggaaacggctttcttcgctttggcaaaaggtttcttaggaatcagtttttccctgtcgcaaagaaactcatgcccgcatttgctgcaattcaccatagagccctccgcggaagaaggcacattgatatgtcgtttgcactgtggacaattcagattcaccgggctccaatatgcacgtttttcattcttttgcaatacctgtcttcccaactttcctcttaccatgtaccccgcgaaaattggcaagaaacttccatcggctcctatttctatcatttccccttttcattccgactctctgattttttccgaatgttaaaactcgctcaaaccgctctcattgaaaataacatttaattgaaaaccattccgcaaacttcggaaaacaagggaaagggaaaattcccacctttccctggcggaaagctggatatttttcagtctcccttatcaggggctcacatttccaaacgcaccttgatataaattatttgaattttacaacacgggccattgaaaaaagataaaaacgctctccatgttcctcctcccgcctcacgtcattccgagtgaacacgcttgcagaagaggtaatttggtagtagaattttcgccatgtcattgcagcctgccgaacgccgagatttcatccgcgatatgatttctgatgaccttgcctccggcaagcatcaggccccggtaacacgctttcccccggaacccaatgggtatcttcatatcggacatgccaaatcaatctgcctcaacttcggcatcgcccaggaatttccgggtgcgcgctgccacctgcgttttgacgacaccaaccccagcaaggaagaccaggaatatgtggacagcattcaggaagacatccgctggctgggctttgactggggcgacaatcttttctttgccagcaacatgttcggcttcttttacgaatgcgccgtttccctcatccgcaagggattggcctacgtagacgaacagacggtggaggaaatacgcgcccagcgcggcaacgtgaacgtgcccggacaggaatcaccctaccgcaaccgctccgtggaagaaaacctggcacgcttccaagccatgaaaaacggggaaatcccggaaggcagagccatcctgcgggccaggatagacatggcctccagcaacatgaacatgcgggaccccgtgctgtaccgcatcatgttcgcggaacaccacaacacgggcagttcctggtgcatttaccccatgtatgacttcgcccacccgctggaagatgcctacgaacacatcacccattccctctgcacgctggaatttgaaaaccaccgccccctctatgactgggtcattgaaaactgccccgtcccggcacgcccgcgccagacggaattcgcccgcctgaaccttacctacaccgtcatgagcaagcgcaagctgctgcaactggtgcaggagggacacgtctccggctgggacgatccacggatgcccaccgtctccggcatgcgccgccggggctacacacctgccgccatccgcaacttctgccacaccataggcatcactaaattcaacggcttcacggatgtggccctgctggaatacagcgtaagggaagacctgaatgccaacgcgccgcgccgcatggccgtgctcaatcccctcaaggtcactatcaccaccctgccggaaaacgcggaagaaatggctgaagtgctgaacaatccggaaaaaccggaagagggcgtccgccgcctccccatcacaagggaagtctggattgaacgggacgacttcatgctggaccctcctaaaaaatacttccgtctggctcccggccgcaccgtacgcctccgggggggctactgcatcacctgcacggactacaagcaggatgcggagggaactatcacggaaatcttctgcgaacacatccccggcaccatcggctccaaccctccggaaggaatccagtgccgcgccgccattcactgggtaagcgccaaatacgcggtggacggagaaatccgcatctatgaccgcctttttacggaagaaaacccggacgctgctgaagaagggttcctgtccgtcatgaatccctcttcgctggccgtcatcacaaacgccaagctggaaccctccctggccggagcggaaccagaattccgctgccagttcgagcgtctcggctactttgtggcggaccgcagggaccatgtaccgggccgtcgtcctgttttcaaccgcacggtggctctcaaggactcctgggcaaaaaaacaaaaataacctctcttcatccccttttatggacaatcaacttcaattctgcaccgttgaagaagccgtggaagaaatacggcagggacggatgatcatcgttacggacgaccctgggcgtgaaaatgaggcagacctgatcattgccgccgaattcgctacgccggaagccatcaacttcatggttacccacgccaggggcctcgtctgcgcacctctttcgccggaacgggcggacgccctccaactcccgctcatgacctccgtcaaccgggaaaacatgtccacagcgttcaccgtctccgtggatgcggcccatgacatcactacgggcatcagcgccgcggaacgctccctcaccattcgcacgctggcagaccccaaagccaccgtcaacgactttgttcagccgggtcatacattccctctccgcgccgttcccggcggagtgttgcgccgcgccggccatacggaagccaccattgacctcgtgcgcatggcaggccttcagcccgccggcgtttgctgtgaaatcatgaaggaagacggcaccatggcccgcatcggggatctggggggattccagaagaaacatggcctgaaagcctgcaccgtagcccagcttattgaataccgccgggccaaggaaaagcaaatccggctggtggaaaccgtcaacatgcccacagactacggagactttacctgccgcctttatgaatcccagctggacggagctcttcatctggccctggttcacggggaaatctccccggacaagcccacgctggtgcgcgtgcatagcgaatgcctgacgggagatgtcttcggctcccgccgctgtgactgcggcagccagctgcacaccgccatgcgccgcatcgcccaggaaggaggcgtcctgctctacctgcggcaggagggccgcggcatcggactggcggcaaaactcaaggcctacaaacttcaggaacagggtctggataccgtggaagccaacctcaggctcggctatccggacgacctgcgcgactatggcatcggagcgcaaatcctgcatgacctgggagcaaaccagttgcgcctgcttaccaacaacccgcggaaaatcgtggggctggagggctttggcataaaaatcacggaacaggttcctctcatcatcccacccaacgaacaaaacagcaaatacctggctaccaaaaaatgcaagctgggccacatcctgtaacattccactccatcccttcatgtccacggaacttccccgccgccagcgcgccacgggcacgcgcgccaaaatctgcatcgtcgcctcggaatacaacgaacaatacacccaggccctggtagaaaactgctcggaagaactgaaaaccgtgcttccctcggtccgcctggaaatcatccgcgtgccgggagcctttgaaattccggtggccattaaatccgttctctcccgctctccggaaaaacgtcctgatgccgtggtggctctgggggtcatcctgcgcggcagcacagaccatgcggaccttatcggctccaccattacccaggccctgatgcagctcgccctagaattcaccacccccgtcattcatgaagtcctgctgctgaatgatgaaaagcaggccttcgcccgctgtatcgcctctcagctcaaccgcggccgtgaagcggcacgcaccgctgcccgcatggcggaactcttcctcaactccctgctccggcaataatacctattactctctcctctctatcgccatgctctcacgcaaccaaatcagacaagccgccctccaatacctttacgccgcctctcagacgccggaaacggaacgggagggaatctgggacatcctgatggaacctttccggggcgactactgcaagctcaaggccaaggccgtctccggccaccttacacgggactatccggacaagctgcgcctcttcatcacccgtgcgcgggaaacggcggacaaacttcagcaagacccccttaccctgcccgttcgtgaccagcttcaggacctgctggccaaggaaggagaattcaacgcctccctgctccggctgaaaaaagccctgcacgaggatccctccaatgacaaggggtccctttccgccgcctgcgacgccgctcagggactcaataccgcactgatgcagatgcgccgccgcctgctggacacgctcaaggacttccccgcctataacgcaatctggccctccctcatttcctcctgcagcaaactccaggaaatcaatcaccgcatcaactgcctcatccacccggacgaccgcccctccctggcggaaataaaaaaagtggtggaggcagggagggatgcggaggacctctaccgggaagccaaaaccctgggagaagacatcctgcgccgccgggacgggctggacgccgccatcgactccaccctggaaaactactcccctgaacgtgtcagcgccattgaccgcgccattctgcgcctgggggcctatgaactcctccatcgcaaagacctcccggcccccatcgtcatctcggaggccatccgcctgtcggaacgcttctcctctgcggaatccccccgcttcatcaacggcgtcctggccggaatctcaaaaacgggacgcccggcataactccgcttcgcaccatggcaggattctttaaaaaactattcaccaaattttcccgaagctcccggatagactgggaagaactggaagctgagctggtagccgcggacatcggcatcaggcgcgctatgggtattgcggaccagttgaaggaaagcaaaggcctggatgcggaaaatctggtggaatccacccgtgaagtgcttcgccgggcctttccttccaccgctccgtccctgcccgcccctccggaaggcaaaccgctggtcattctggtcgtgggcgtcaacggcaccgggaaaaccacttctgcggccaaattggcccatttgctgcaaaaacagggctcccgcgtcctcctcgctgcggcggacacttttcgagcggccgccgtggaacagcttcaaagctgggcggacaagctgaacatccccatctgcaagggtgcccccagccaggatccggcctccgtctgctatgaggcccatacgcaggccatcagggaaggcttccaatacctcatttgcgatactgcggggcgcctccatacgcgccacaacctcatggaggaactctccaaaattcgccggactctcgccaagcaggatgcatccgccccccacagcaccctgctggtggtggatgccaccacaggcgctaacgccctggcacaagccagggaatttcataaagcgacgcccttggattccgtcattatcaccaaaatggacggttccggaaagggaggcgtggccgtagccatcatggatgaaatgcacatttccccctcctttctgggaaccggggaaggagccgaagactttgaacccttcaaccgggaccgctacgtggattccctgctgtaacgggaccgcctcaaatccatgccacctcttcccctcatcactgcccagacggaggaaaagctgctcgccttcctgacggaacacgggcacactaaattccgcacccagcaggttctggactgggtgtggcgcaagcgcgtcaccacctttgacgcgatgagcaacctccctcccgcgctcaaaaatctgctggcggaaaatttccgtttccacacgccggaaatcgtggaaatccacggttctgcggacaccacacgaaaattcctcaccaaaatggaagacggcagtctggtagaatccgtcatcatccctgccgcagcagcggaaaatggagaaaaatcggagcgcgtcaccctttgcgtttcttcccaggtaggctgcgccttcggctgcaaattctgcgcttccgggctgctgggccttaaacgccacctcaccacgggggaaatcatcgggcagattctctctgcggaagccattgcgggaaaacgggtcaacaacatcgtcttcatgggcatgggggaacccctctccaattttgacaacctggcggatgccctggaaatcatcacttcccaccgcggtctggaaataggggcgcgccacatcaccatctccacgtcgggattcgttcccggcctgaaaaaactggcggcctatcccaggcaaatccgtctggccgtttccctgcacggagctacggacgaagtccgcgaccaaatcatgccggtcaacaaaaaatggccgctctcccagctcattccggcccttgaggaatggaacaggggaagaaaccagatgcccacgctggaatacattctcatcagggacatcaacgattctccaaaagacgcgtcccatctcgtccggatcgccaaacgcctgcacgccaaagtcaatctcatcccgtacaacaccgtggaggggctcccgtggaaacgcccttcggaagaacgctgccgttccttccgggatgcagttcacaaggcgcgcatccccgttaccatgcggtatgaaaaaggccatgacatcaacgccgcctgcggccagttgaggctgaggaaggaacaggaaaagagcggaaagacgtcccgttgacggaacggggcttttccgaatttgcaacgttgcctattgcccggcgccctccgttgtgctatcctttccggccggatgccacccatccagccgcctcaccatggaaaccacgacaaccaccactgccgttcccccgctggaactgaccagggcaccccgcaaaaccccgtccctggacctcagggacattccgcaggctcccggcccggaaaaaggagtgctggccctcatggccatggacccggccacttacgtggggcagtgcgtgaccatcggcatgacggaggactacttctacctccccgcgcacaagctgctctggcgccttttccaggcccgctataacaaaaacgaacccattgacatcgtttccatcacccaggctttggaagacatgcaccagctggaagccgtgggcggaagcgcgggcctggcggaaatatacacctttaccaccaccggagcctattttgagcattacctcaatgtcctgaaggacaaattcatccttcgctccatcattgacatagccaaccagtccaccacacaggcctttgacaatccggacgacgtagcggaactgctggattctgtggaaacccatattttccagatacgggaacgctataacagcgccagggatgaacaaagtttggtaagcctcgtcaaacaggcctacaccaactttgaaaaaattcatcgcaagcaaaggccaaatccagggactgaccacgggatttgaggaactggacaaaaaaagcaacgggcttaaaccgggggacatgttcatcatcgccgcccgtccctccatgggtaaaacctcctttctgctcaacatcattgaacacatcgcgcttaacgaaaaaaagcctactctgctcttttcctgtgaaatgcccgcagtccaaattgtggaacgccttctctttgcccgttccggtgttcgacgcgcagaaataatcaagcgtggcaacctcaaccgacttgaaatgaagcactacaaacaggcggtcaaggaagtggcggaatcccgccttgtcattgacgataccgcagccatctccatcaacgaactccgggccaaagcgcgccgtgtcatgagggatcagggaggtctggccgccattggtgtggactatctccagctcatgcgctcccactccaaacaggcggccaacagtcgtgaacgggaagtggcggaaatatccgccggcctgaaagccctggccaaggaacttaaagtgcccgtcatcgttctggcccagctcaaccgcggcccggaaagccgcacgggagccagtttaggcgtcccccgtatctccgaccttcgtgaatccggctccatcgaacaggacgcagacatgatcggcctgctctaccgctccgcctactatgcggaagatgaggaaaaacgccagcaaatggccggacgggccaatctgcatctggccaaaaaccgcaacggccccacgggggacgttccgctccactttgaagcggaactcatgcgcttctccacacgtgaggcggatgaacacgaccaggaaagcgaataaaacctctcgctgtctgtgcctgttctctgcggattaacaatccgttacaggctgaaaccgaagaaaattctgtttgatttgggaaaagttacaagtttctacggtcattgaaatgatacgttctttctacatgtaactatttccagaaaagggaattctcaaaattttattgcaaatttaaataccgcaaaggcctgttgagttttcattggaaaccgatgatgccagtcgggcttgatttcatgaaaacgtcctctgatacgaaaggaaacgtctacgcaagttattttctcttagaatcaaatcttgaccccggattgttaaaccggtagcatcgcggcaacgtcagcatttcttctggccttattgatcaaattatttctgtttttaatatgaaaaaaaacttatttattgctgcaatcctctgcggatcatgcatcttcgctaatgccgccagcatggtcacggaatggaccggcaatgccggccctacggaaggcaacacctatgaactgggcaatgcagacaactggagcaacggtgtacccgcccgcggcaacaaccagggaccggatgtaatttttaataacaccggaaccatcaccctcagcggctccatggtggacacatccgatggcggcagcattactgtcacaggcaacagcaatgttacggtggggggaacccgctggacgggaaatgtcaccattggagcaggttccgctctctccctctcacaagtggactttaaaagcagtgacatcatcctggacggcaccttcaaccttggcgtttgcggcattgatggaggcggcaatggagcccggcttgtttttggaataaacgggatcatgaacgttaatcagcaaatctggggagcatccagcttctccgtttccgggatgctggccaccatatccacggatctggctgctggagaattccaatttgttacccgtacgctgattacctcatccggcttcaatggcggttccatttccctgggagacttcaccgctgaagacggcggagcgctgaccaaggcatccggcatcatggaagggaacgccgcggactaccagggccagtactatctctacacggaagacgggaatgtcaaagtgcagtacgttgtggcgggagccgtgccggaacctgctacggccaccctcagcctgctggggctggcttccctgatgctgcgccgcaggcgcgcctgaccttttctccggtccttttcctcaacagcctgtatgcccacgcgtacaggctgttttgttttccagacgagtgacgaaaacgtcacggaaaacatcttcatgccattgccgggaatccgtagcattttttcattatcttccgttcgacgtcatgcaagcccacgcaaaatcactcaacgaacgtttccggaccctcatctccctgattttcggtctggctatcggctgttccctgctcttcggggaatcccgctgggaaacgtctcctctcattgaagaaagcctcatgctcctggcctgcttcatggccggcataggcgccttcgggcgcatctggtgctccctctacattgcgggttataaaaacaacgtcctggttactgacgggccatactccatgtgccgcaacccgctctatttcttcagcttcgttggcggcataggcgtatcctgcgctacggagaccttcaccatccccctgcttacggcgctggcgttcggaatctactacccgtccgtcatcagaaaggaacaggaaaggctcctcacccttttcggagacgcctaccggaactattgcaggaacgttccctccttcattccctccctctcacggctcaaaccgccgccggccgcctactccgtcaatcccgccacgttcacgcacaacattgtggatgcgctgtggttcatctggttcatcggcatctttgaattcatcagcgggcttcatgaagccggaatgctccccgtatggttcctcattccgtaacaggctcttttctcctggcatccagaagccccgcaagcgcccgttgggaaaccattttacggaaagatgagcggtcccgcggataaagcatcatctccgcccgcgtctcccccccccggaaagcccaggcaagccatacggtccccacaggcttttccggcgtaccgcctccgggccccgcaataccgctgacggcaacagcaacatcggctccggagcgttccagagctccttccgccatcgctttaaccacgggctcactgacagctccgtaacgcttcagaacattctccggaacgcccagcatctccgtctttgcccggtcggcataagtaacccatccgaattcaaaaaccccggaggcccccggaacatccgtaatcctcttggcaatcaggccgccggtgcagctctccgccgtcgccgccttcagaccctgctgcgccagatggcacacaaccgctttctccagggatgccccggcaggagcgagcacatacgccccggccagaatgcgcaaacgggcttctccctgtttcagggccacctcactgcccaccaggcgcacgtccacttccccgacgcgcgcgcaatacgctacctccaggccctccacctggtgcagggaatcatccaccagctcctggagatcgctctcccctatccctaccaggcggaacacgcgcaaatgaggaatatcctcatccgccaaatcttccagaagcggcatcacggaatgttccaccatcggcttcaactccgccggcggccccggcagcaggatgaacatgggaagggaaccgctggcaggcatcaccagtccgggcgccgtcccattggaattctccagcaccgcggcgccatccggaaccatggcctgcttgaaattacactccgcaatgggaatccccctccgttcaaaataactcttcagccactcagccacacgctcgtcacggtgcatgtccacgccgcacacgtcgcacagggcttcccgggtcacatcatcgctcgtcggccccagtcccccgcttacaatcacgatatctgcgcgccgggcgctctccctcatggcctcgttaatagcgtaaccgtcgggcacgacggttaccctccccacacggaacccggcctcaaataatctgttgcccagccatgcggcatttgtattcacaatactccccagcaaaatttccgtcccggtgttgatcaattcaaccctgatctgtttcatgcagccagtatgctctctcaagcaccccgtgacatgcaacaatcctgccatgtatcataaaaaacttcatttaaactccccgtaagatacattaggggtactgacaaagaccatgaacacaccttcccggccccgggccaccaaaatcatctgcactattggaccagcaacagacacttccgacatgctgggacagcttattgaagccggagccaacgtcttccggctcaatatgagccattccaaacacgactgggtccgggaagtcgtcttccgcatccgccggaaagcagcggagctggaagcgaacgtggccatcctatttgacctccagggtccctccatccgtacgggagacctggccgaaccctaccatttgaaaaagggagacacggtagaaatccgcctgggcacggccaagccggaacttcctttttccaccacggtaaactatgacggccttctgcaggatgttcaggcgggccataccatggtggtggataacggcggcatcctcatgcgcattgcggaagtacgcccggacaggctcatctgcgacgtgctcacggaaggcgtattcggctcccgccgccacatcaaccttcccggcgtagcgctgcggctcccggccctgacggaaaaggatctggcggacctggccgtggccgtagaatgcgaaacggactacgtagccatgtccttcgtccgggatgccgcccacattgcccagctccgggaacacatcgacaacttgggaggcaaggcccagatcgtcgcaaaaattgaagaccagcaggctgtccgccacattgacgatatcatcctggccgcagacgtcatcatggtcgcgcgcggggacctgggcattgaagtcagcattgaagaactgcccatcatccagcgccgcatcgtccgccattgccacaggctgggacgccgctgcatcgtagcaacgcatatgctggaatccatgataacccagcccacccctacccgtgcggaagtcacggatgtttccaacgccatctttgaacaagtggatgccgtcatgctttccggagaaacctccgtgggccattaccccgtacgctgtgtggaagtgctggattccatcgcccaccgcatggagtgctccggcaatctcaacttcgcggcatccgccatcctgaacggagaccgccagaaagccaccaaggcagccatctccctggcggactccgtggaaaacgcctgtctgatcgtctttacccgccgcggcctggccgccacgcaggcagccgtcctcaggccggaacgggctgccatcttcgccttcagcaatgaccctgtcgttgtcaggcaactcgccctggcgcgtgacgtaaccgcctttgaatctcccttcctgaaagacccggcccgcatgatttccaccgccctggacctgctgaaggaaaaagggctgatctcctccggccagcctgtcgtcatccagggggacagcctgcaaggggaactgctggcggattccattatcttcatgcgcgtggaataatggcctgcacctttcctatagagcgggagacggccgtgtggcccccgtccgcccccctcagggaactcctgctggatgcggatccggacgaacgccggatagcggatcacctggcccacggcgaactttacgtcgcaaaaaactgcgggactgccgccggagtcattgttatccgtcagacgggggaacatacatgggaaatcatgaattgctccgtagctcctgaatatagaaggcagcgttgcggaacagccctggtgcggcacgccctggacatcatcagaaacaaagggggccggtatgcggaagtgggaacgtccgatgcgtctccggggccaatggccctgtatgaaagctgcggattccaggtctatggcgttatcaacaaccacttcacggacaactatccggaacccgtctgggacaacggcgtgcaatgtattgacatgatccgcatgcgtgcggacctctcccttcggaaagaaggagcgcatcatactgctcagaaagcataaaccacgctgactcccgtcacccagctattgccctttaccagcgttcttccatacacgcggttcaccccgtgggaacccttgccgagccagtgcaggccaacaaaaggctctataaaaacattcccgaacagacggtaattcgccgtcaccctgaaatagagggactgccagccattgctgctggaaggccaataggaagaactcaacacggcaccgaatttaaaccccatataaaggttttccgtcatccggaaatccgatcccgtgcacatgtcaaaccaccagcccgtgattccgtaaaaggaataggcggcacttccctgcgcataaaaaccggggaggaatcccacatcatggcgcataatcagtgccgcttcatacgttgtccccccattgccgaacaaacgttcggaagcaaaccccgccaatccgccgtcattcgcacgaaaggataatgccgcatacgtagcttttccgaacttccgctgaagaccaagatccaccaccgtctcattctctatatcaaccgccggatgccccagaaagatctcctccttcagagccagaatcagggaataccggtcattcaaatcgcttctccaatccagccgcaaaggagccgtgggattacagcccgcgggaatcagccccctgaactcgtaattagtggaatacccggctttgatactgccgctgaccggtcttaaagcaggagcggaaggaacctccggaatgcgtgattccgccgaagaaacggccatgaaagcgacggaggccatgcccgctccaaggagaaaagaaaaaaagaaattcataacatcggaatgccgtacggaaagtattctggataaaaaaactcctcttggcaacaagcaaaaacgccgctgtttcctgcgctgcttcaggaaacatcattcaggcctgcccgctgccaacttcagaaaaaataaacgagaccagccccggccactactccgaaattcttataaggcttgtcgcccctgtccgaacctcggttggccttcaaggcgccctctccggcccagttgaagctgacgaagggaacgagagacaggttcttggcacccagcttcaccggaagttcagccttcagccaccatgcctgggaaccgttggacataaaaagggatttattgtcaaaataagaggaagtggcagacatcccggcgctcaatacaaaatcggcgtcggagcagatagcagcctgataccccacatgcggccggaaccaccagccggtcataccctggaaggcatagctcatggttacgccggcaaaccagtttccgggcaaaccgtaatccagcgtcagataaaattcctgaatgacggaatgggtattccttctatacacatcttcatcactcatccaggtggcgttataatcatacctggcaaaattcccaagcaggccgccgtgaatcaggttccagccaagcgtcgtggacaggttcttcagtaaaccgtcccggttcttccatccaaaaagaaaatcagtctcgttatgaaaagagaaatctctttcccctgccatgtggtgtcctgaaatcaggaacgtacaagatgccgccccaacaacggaattacaatcatccagcttataattcaaatccacactggcaggaataattccatctccttccgtcagtgaatgagaagccacaatgccgcggcaggtgtaattggaagcatacccggcattaacttcccaggacaaaggacagtcctgttccacgggaacaggagaaacagttttaacggaaattcctgcaaaagcggaagcggcaagaaaaacggcaccccccgcaacaccaatgatatttctgaattgcatcatcacgcttcaaatgaaaatttggatatcggcgcattgcaaaaaacggagttcataaaaaacaatgcgccgccatcaattaaaaaaagcgcggcggatttctccgccgcacctgaaaatataattcaatcgcaggccggatggcttagaaagaatagacaaggctggctccagccactacgccgaagttcttgtaaggcttgtctcccttatccaggcccttattgaccttcaacgcgccgcagccggcccagttgaagctgacgaagggaacaagggacaggttcttcactcccagcttcaccggaagttcagctttcacccaccaggcctgagcgccattggcctgctcgaacgcagcgccaaaatagctggacgtggcagacatcccagccgtcacgacaatgtccgtgacggggcagagggcggccttgtagccaacataaggttggaaccaccagccggtcatgccctggaaggcatagctcgtggttacgccggcaaaccagttctgagtcagatcgtaattcagattcaggtaaaattcctgcgtgacggaatgagcatggtcatacttggcaaagctgcccagcaaaccgccgtgaatcaggttccagccaagcgtcgtggacaggttcttcagcaaaccgtccttattctgccagccaaggttgaaattggtctcattgtggaaggaagtatccctgtcccccatgagatggtggcctgaagtcaaggtcgtataagaagcggaagccacgatggagttggcatcgcacagcttgtaattcagattgacaccggcggggatgacgctatccccttccgccaacgcgtgggaagccacaatgccgcggcaggtgtaattggaagcgtagccggcgtaaatatcgccggacagcgggctggaagtcgccacaggagcgggaaccggagtcggagcaacaatcttgacgggagtacccgcaagagcagctccggcaaaggatgccacaactgccgcaacactgatgatgttcttggtttgcatgactattacttggttagggtattaattgttgatttgctaacatggaaagaaaaatgctttttccccccttgttaagaaaagtgaaacattttcgtcacaaaagtaaagaattttctcttgataaatcagcaagtcattgatttcacattatttacatccaccagccccatgacaaaaaatccaattctccatatcttgccaaaccttcccttccaaggcctggccggatacagacactccgcaccatccagaagcctgtcttctttcagggcaggagaaggattcaccagaaccctccgcctgcaggaaagcagcatgggcagatccgcggcactgtcgctgtaggcaacggcgttttccagaacaccatgttccggcagtacattccgctcccgcagacgctccaccttcaccgcccccttattattaccgttcggcagttccggcattgccggcatgcgttcctccagaagcacatccgttcccagaacttcgtcaaatcccagcagttcgcccagaggcttcacgtaaaatgatggagaagcggaaaccatgagacacaaataacccttcttccgataccctgccagccgctccttcagctccggataaatccattcctgcgccatctcggcaaacttccgtccatattcccgcaccgtttcagcgggaagcccccacaaatacatgagataagccctcttcatccgattctcatcccatattctcaaaatatagagcggaatacaggccaggaaaagaaaaatcagcaagcgtctccaaggatggcgcctcaccacaaaacaggaaaaaacatattgcgtatcccagggaaagagcgtgccgtccatatcaaacagcgctgcgcctctttttttccaatcgtccgtcatgctttcatcctatacccgcttcccttaactctcaacacccaactcttccatgcccctcctcctgaatgcccaaaaccccggccgccgaaaggcaaccggggttttgaagcaaatccagaaggaaataagattaacgggagtaaaattccacgatgagctgctcgttgacgatgggagcaatctcttccttggaaggcacgcgggcaatcttgcccgtgagcttgtcacggtcgcattccagccagtcaggaaccacagtagcctgagtcaggtcaaggaaacgggtaaccagctgctgggaagaagccttgccgcctacggcaatgacgtcgcccggacggcaggagtaggacgcgatattcgtcttcttgccgttcacggtgatgtggccgtgggaaacaagctgacgggcgccggcacgggtattgctgaagccgaggcggtacacaacattgtccagacgaagctcaaggagctgaagcagaatatcgccggtaatgccgcggcggcgggcggcttctgcataatacttgcggaactgaccttcaagcacaccgtactggaaacgcagtttctgtttttcagcaagcatcacgccatagtcggatttcttcttgcggccggcgcgcatgccatgctggccgggagggaaggggcgcttttcaagagccttggtggaaccgaaaagggcaacgccaaaacggcgggacactttatcgcggggaccggtataacgagccatgatatattagatctatataggtaaaagattctcaattagacgcggcgggccttcggaggacggcagccgttgtgggggatgggggtcacgtccttgatggaggtgatttcaataccgatcgtctgcacggcacgtacggcggattcacgaccggaaccgggcccctttacgcgcacttccacttcacgcaagccgtgacccatggcctggcggcaggcgtcctggcacaccacctgcccggcataggccgtgctcttgcgggaacccttaaagcccatcttgccggcggaggaccagccgatgacattgccgcgctggtcagtcacagttacgacggtgttattgaacgtggaggaaacgtgaaccacgcccgtggaaacgtttttgctgcccttggccttcaggattttgggcttgtcatcatcgccgcccagaccaagttccgcaaagatatccttgcggggttcgggcttcttgatttcttcaggagcggaaacagcggcggccggagtttcagcgacgggagcggaagctgccacttccacaggctgttcggcggtttcgttggtgatttcttcgctagccatagtaaagctatattaaaaattcaggttggcggattacttcttcttggcctgcgcgccaacggtcttcttcttgcctttacgggtgcgggcattcgtgcgggtacgctgaccgcgtaccggaaggccgcggcggtggcgctgaccacgatagcagttgatggaggtcagacgcttgagaatggattgcttttcacgacgaaggtcaccttcaatcaaaatgccgtcggtggtgattacttgaacaatcttcgtgagctgttcgtcggtaagctgtcccgtgcggatgtcgggattgatgcctgcttgttccaggattctcttagaagtcgagcgaccaattccgtaaatatacggaagggaagcctcgatgcgcttctcgttgggtatttctgtaccgaaaaggcgtgccataatggattggatttgctagctgttatttttctctgcctcgcgcagagctattgcttggggcaagatggataccataaattgaggttttgacaagaccaaaacatcattttttctatttttaatctcttgcaccgcttgaagatgcatgccgcccgtggcggcggaggatgcgctccacagcccaggaagcgtgttcctccaccagaggagactccccgtaaagcgccttcagaaaatcaatgtcatccggagtccccgcattccccagcacaacgcagccgttacgcagcagcccttccctcttgagccttttcaacggggaattccggaacagggccgcaaaaccgccggcatccagggaaagaagaccgcgcaggggaatggaagccagcagacgggacatgcggaaccgttcgtcaacgtccggcaaaggcttaccgttccagggacagaccgtcacgcaggtatcgcacccgtacaggcgcgtgcctatcaggggacggatttcttccggaatagccccccggtgttcaatcgtccagtaggaaaggcagcgtccggcatcaacctgaccgttttccataattgcgcccgtcggacacagggccgcacaacggcggcaactgccgcatccgtttgaaaccggagcgtccggttccagttccagcgtagtcagcagggtagcgataaaaaagcgggagccccctttcctgcgcacgatcaaaccgcttttcccgcgccagcccaggccgcaggcctccgcatggtcccgttccataacagggccggagtccacataccccctctgcttcccgccgtaaatggaaagcagctcctgcaaatccgccagtttttcctccagaattccgtggtaatcctttccatgggcgtaaaggcaaatgctaccctccccctccgggcgcctaccggggctgtcataatcataggacaggcaaatgacggaacggcatccgggaagcacttccgcaggatccgtgcgccgctccggggaaagcgccatccactccatcccggcgtgccatccgcgctccagccattgaaacaatttttccgcatgcgggcttttttccgcacgggccacccggcagccggaaaaaccaagctgccgggacacggcgcacaaggaatctttaataacagaggaatccggagtcagcacgccggaatcatgaacaagagcatgcctcccaccaagaattttcttctgtccggtggaaattggattgcctgcaccccgccgccgcttcataatgccgcatatatgaacatccggattctgagcgatgggaaacagggccacctcaaccagtccctggggctggcgcaggctctgatctccaaagcggggggaaccgtggaaacggtagacctgcaggggctttcccttttggggaaaatccggaaggtcgtcacaggcagcgacattccacggccggatctgttcatttccgccggacatgcaacgcatatcccgctcatctgcgcgcggcaccatttcaaaacccgggccgtcctctgcatgaagcctacgcttccctgctcctttttcgacctctgccttattccccgccatgacctggattccggccgcgattacacggatacggatatcttccccacccagggagctctccaccccatgagaccggatccctccgtaccaaaggataccacactgattctcataggagggcccagcaaagattttgactgggatgacgaaagcatgctcaaccagctcgcgtccatcagcatccacacccccggacaccttgttctaaccacctcgcgccggacgccggacggctttgcggaaaaaatccggacggccgttccggaactaaccgtcgttcccgtggaggaaacccggccggggtgggtagcccggcatctggcgcacgcctccgccgcctgggtcagccaggacagcgtctccatggtatatgaggctcttggctccggcgcgcctgtaggcatcctttccgtaccgcgccgacacggcagccgcaaatcccgcatcctgtccggcctggagacactggaaaaggaaggcatggttactggatacagtgactggaaaaaacagaacttccgcctgacggctcccggttccccgcttctggaagcggaccgtgcagcagactacatcctctccagatttttccctcagctccgcgccttatgaaaatagtacatctcgtcccctccatggaatccggaggcgtggaacaagtcgttatggaactgggcagcggcctttcttcccggggcgtggaaaatatcgtcgtttccggaggcggacgcctggtgccccgtctggaaaaggaaggctcccgccacatcctgatgccgataggcaaaaaaagcatctccactctcttccgcatcggggccctccgcgccctgcttcaggccgtcaggccggatatcctgcatctccattcccgcgttcctgcgtgggcaggctacctggcatggaaaaagctcccgccggaagaccgccccggcctcgtcaccagcgttcacggcttctactccgtcaaccggtactccgccatcatgagccgaggagagcgggtgatcgccgtctccaactgcatcagggactacatccttgaccattatccgtccacccctccggaccatatcagaatcatacccaatgctatttccccggaccaatatcacccggcctactccccctcccgggaatggctcacgggctggttcatgtcctatcctgaactgaaggggaaattcaccctgtgcctgccgggccgcatcacgcgcttgaaagggcatctggatctgattccggtcgtcaggcagcttctggaacagggaatcccggcccacgccgtcattgtaggagaagcaaagaagggaaaagaagaatataaaaacgaggtcctgcgggcaatagaacgttccggcgtctcccagtccttcacctggacaggccatcgccaggatctgagggaaatcctttccacatgttccgtcaccctctccctgaccaaaagcccggaagccttcggcaaatcaaccctggaggcgctcgccctgggcaaacccgtagccggatacgcccacggcggagtcaaggaacagctggacgccttccttcctgaagggaacgtcgccgtaggagataccgccgccatggcgaacctgctggcccgctggcatacccagcccccccccctgccccggcaaattccttccccttacaatatgcaggatatgattcaagcccatctggacgtttaccaggaactgaccccttattcatgacaccccgggaagcagccatagccctgaacctgataccgggcctgggccctgtcagaatcatgcgtctcctgcaggtattcgcctctccggaactgattctggaatccccttcctccctgttgatggaaattcccggcgtgggggcgcagctggcttgccgcatttcctcttggcggagcatcgtcaacccgtacagggaactggaactggcggataacgcgggggccgcggtaaccacggtttttgacgactcctacccatccgccctgcgtgctctcccagacccgcccattgtcctctactcctggggaaactggaccggaacggatgccgaacgctccattgccgtcgtcggctcacggatggccacccattacggcaggctctgcgccagaaacatctcccatgacctggcggaagccggagtcaccgtcatttccggactggcgcgcggcgtggacacggaagcccataccggggccatggacgcggaggggcgcaccatcgccgttatcggggcaggactcaacaaactgtatcctcgggaaaacagaaacttggcgcagcgcattgcggacgggcatggagcggtagtctccgagttcccgatggacctgcccccctcccgcaccacttttcccatgcgcaaccgcatcgtgagcggctggagccgcgccacgctggtggtggaggcgtccggacgcagcggggccctgatcacggcccgaacggcggccgaacagggccgagaggttttctgcattcccggaccggttgaccggcattcttccgacggatgccatgccctcatccgggacggagccatcctagctaccggagcctccgatattctgcaggacatgaactgggccgttccggaacagggactgcctctcttctcgccatgctcccctgccggagcctcaaccccaccgcttcccactttggaagaaaaggagattctccacgccatcagactgggtttcaatactattgataccctctgcacctctctgggaaaagcggcgcataccatcaccccgcttttggccagaatgcaaattgcagggcaaattactccggacgccggagggtatttctccattaacagcagggaactttaggcagattccgcttttccgccggggaaaacgccaagtccgggcctcctctccctgaccatggaaccggaagggagcgccgtccatctcccgtataaaaacctttccatccggatgcaaaaaaacgtcttaaaacagtcgccaaatcctttccttcaataattttattccaaaaattaaatatatcggcaggacatccccggcattttaaatgcctgcggcaaatttacatgcccgcgaaaaacaaaatatgttcggaaaaaatctctgccatatttactggacgcaggctcgggcgcatacggcaacacctcttaaaaagaactgttgacgaacatattttgaacacatacctccttcctgtagtctcatccttcacaagatctgtccgacggatggaaaaagcaattcaaaatccgttcagggtggtttttggttccataggtagttaatagagaaaaaaggccgcggattgtccgatccgcggcctttttcgtccggctctctttcaaatgcggagtttgggcttgatgaacgaaacttcttactgtagcaacaagacatgcgtttattcgcccttcttgcaggattctccctttgcctgagctccacaagctgccaatcgtacggggattcaagtgactacatccccctcgcaacgcccgttcccccacaactctcccagccggtttcccatgccctcccccgaccggccaatttccccacacgtcccgtagccatcccctcaagcgccccgcgcacgccccgctgcgccagtgcctgcgttatggacgcccttaccggcaacgtgctcttttcccacaacggcctccagcgccgccaggtagccagcacgcagaaactcgtgacggccatggtcgtgatgggacacggcagtctggacaaaaaagtggtcatccagccttccgataccaaggcggaccccaccaaactgggattccgggcgggggaagtctattcacgccgcgaactgctcaatgccatgatgatccgcagtttcaacgacgtagccctggctctggcccgcgatacggctggttccgttccccgtttcgcccagttgatgaatgccaaagcccggcagatgggcatgtacaactcacgcttcgccaatcccaacggcctcccggcggatcaatattccactgccattgacatggcccgctgcgcctattacgtgtaccgcaacccggaactgcgcaatattatctgcaaacgccaatatgcctttacccgcgccaacggcagaacgcttctgctgagaaacaccaacaagctgctcacccagaacccctgggttaccggaatgaaaaccggatacacgaacgccgccggacgctgcctggtttcctcagccggcgtcaacgggcgccatgtcatcgtcgtcgtcctcggctgccatccgtcccgtatctggacggaatcggaaaacctgatcagatgggctctgggaaccgccgcataaatgcccgtcggcaattggtatttgactttcacggcgtgacccgctatcagtcctgcctatgttacaggcaggtattgtaggtctccccaacgtcggcaaatccactctattcaatgcggtcacccggacgcgcaaggcccaggcggccaactatcccttctgcaccattgacccgaacgtgggtatggtaacagtcccggatccccgcctgcaggttctttccgacatgtccggttctgaaaaaatcatccccacgcttattgaattcgtggatattgccggtctggtcaagggagcctcggaaggagccggcctgggcaaccagtttctggcgaacatccgtgaagtggatgccatcgtgcaggtagtccgctgctttgacaatgatgatatcattcacgaactcggttccgtggatcctctgcgcgacattgacatcatcaactcggaactcattctggcggatatcgccaccatggaaaagagactctcttcccgagaacgcaaggcacgcagcggcgacaaggaagccaaggccgaagtggccctcatcaccaaactcctgccccacctgaacgaaggcaatccggccctcacccttgaaccgcagctggacgacgatgaacgcaagctgctccattccttccagctgctttcggataaaaaaagcattttcgcctgcaatgtcaatgaagacgaactggcggacgccatctccaacccggacgcccatccctacgtctcccaggtgaaaaaatacgtagcggaacaccataacgcggaagccattgtcatctccgcccggattgaagaggaactcatcgacgtctcggaggaagaatcccgcgaattcctggaatccctgggtgtgaaggactccggcgtttccgaccttatccgcgccgtgtaccaccttctgggcctgcgcacctaccttaccacgggaatcaaggaaacgcgggcctggaccattccgtccggggcaaaagcacctcaggcggccggcgttatccacacggactttgaacgcggttttatcgccgcggaggtagtgcactacgacgacctggtttcctgcggcggcaaggccggagcgagggaacacggcaagctgcgcatcgaaggaaaagaatatgtcgtcaaagacggggacgtcatcgaattccgcttcaatgtctagacggaagcgttaccggaattccattgacttttactgatataaggggcagattgctcacaaccttcacatcgcctcatgactgatacagacgtcaaatccacccccctggcagctaaacacgttgaactgggagccagaatggttcctttcgccggctggaatatgccggtgcagtacaccggcattctggacgaacacaaagcagtgcgcgaaacctgcggcatctttgacatctcccacatggggcagttcacggtagccggcggttccgctgcggcatggctgaactccatgctgaccaatgacatcaacaaactgaatgtagggcaggggcaatactccgtcatgctcaatgacagggccggagtcattgacgacctcattctgtaccggatggaaccggaaaccttcttcgtagtggtgaatgcctccaagattgatgaagacttcgcatggctttccgcccatcaacctgcaggcgtaaccctggaaaaccactccgacgaatacgtggggctggctgttcaaggtcccgaatgcggaaaagtattctcccgcgtcatccccggcgtggaacttcccccccgcaatggaatctcccgcatcacggcggaagggacggatctcattatctgccgcaccggctataccggggaagatggttttgaattcttctgcccggctaaggaaggcgtcaaatggtttgaagcctttcttggagcaggagccaaaccctgcggcctgggcgcccgcgacagcctgcgtctggaaatgtgctatcctctgaacggctccgacctctctccggacaaaacgcctctggaagccgggctcggattcttctgcgcgctggatacggacttcatcggttccgatattctccgggaacaaaaagccaacggcctcagccgtcggctggccgctattgaatacaccggcaagggagctcctccccgcgcccactatgccgtgcacgtccccggcggagaagccatcggagaacttaccagcggcgtgctctctccttcgctgatgaagggcattgccctggcctacctgcctgccgcccatgccaaggtcggcacggagctggaaattgacgtaaggggaaggaaattcccagccgtggtcgtaaaaaaacccttttataaaaaaggctgacactacggcgcaaaaataaactgacaaacccctcattttactacactctcacttcaaacaattacatcttatgcacgacgtaccagaaaatctgctgtattccaaagatcacgaatggattgaaattgacggggacatcggcaccatcggcatttccgaccatgcccaggccgaactctccgatgtcgtctttgtagaccttcccgaagtaggcgccaccgtcgcagctggcgaccctgtcgctgtcgtggaatctgtcaaagccgccagcgacgtgtacacccccgtttcaggagaaatcctggaagtgaacgaagagctttccaatgatccgtccctcattaactccgacccctacggcgcaggctggctgtacaaaatccgcctggacgttcccacggaaacggaagatatgatgaacgccacggattacgaggaatactgctcctgaaccattcttccctcccccgccccggtgattccatcccggggcattttgtttggcccgttccgcggtcggacgctattaccagccagagataccacatgaatacccactcagattttgccagccggcacatcggcccccagggggaagaacgccgggaaatgcttgacagcctcggctaccggacgcttgacgaactcattgcggacatcgtccccgcagatatccgcatgaaggccccgctggacctgcccgcagccaaatcggaaacggaagccctgaaggaactccgttccattctgcggaaaaacaagctcctaaaaaccttcattggccagggctattacggcaccatcactccctccgtcatcctccgcaatgtactggagaaccccggctggtacacggcctacaccccttatcaaccggaaatcgcccagggacggctggaaatgctcatgaatttccagaccatggtctcttccctgacagggctgccggtagcgaacgcctccctgctggatgaaggcaccgcagcagcagaagcagtcaccatgtgccggaatgcgcgccccaaagcaaacaccttctttgtggcggacacctgccacccccagaccatcagcgtcatccgtacccgcgccgccttccagggcgttaacatcatcgtgggagattgctcctcctttgaccccgcatccatcggtgcggatctggccggagtgcttgtccaatatccggacacgctcggctgcatctgcgactacacggacttcttttcccgcgtgcatgccacgggcgcgctctgcgtcgtggcggcggatctcatggcccttaccgtcatccgggaacccggcgccttcggagccgatatctgcatcggcaacacgcagcgcttcggcgtcccaatgggcttcggcggcccccatgccgcctatatgtcctgcacggacgctctcaaacgccgcatgcccggccgccttatcggcatgtccatagataccctgggccgcccggcctaccgcctggccctgcaaacgagggaacagcatattcgccgcgacaaggcgacctccaacatatgcaccgcccaagtgctcctggccgtgcttgccgccttttacgccgtataccacggccaggaaggcctcaaacgcatcggcacggaaatccacttgaaaaccaaaagcctgtacaaggcgctcacggaagccggcattgccattgaaaacaaaaacttctttgacaccctgctgctgtccgttcccggacaagcggacgctatggtgcaaaaagccctggaagccgggtataacatccgcagggtggatgccgaccacgcagccatctctctggatgaaaccgcaacctgtgcggatatagcggcactggcctccgcccttgcaggtgcggaaacatccgccacctgcgattgcgacgctcctgcctgggatcccgtccacacgcgccagacgcctttctgcacggaaaaggctttcaactcctaccattccgaaacggaaatgatgcgctacatccgccgcctggaatcccgggacctggctctaaatgaagccatgatccctctgggctcctgcacgatgaagctgaacgccgcctctgaaatgattcccatcacgtggccggaagccaactccctgcatccctttgttccggcggaccagtcggaaggcatccgggaaatgctctccgtcctgtccgaccgtctggcgaaaatcaccggctttgccgccgtttccctccagcccaacgcgggcgccgcaggggaatatgccgggctactggccatccgccgctaccagaagcacgccggagaaggccaccgcaatgtctgcctcattcccacctccgcccacggaacaaatcccgcctcctctgccatggccggcctcaaggtggtacccgtcaaatgcgacgaaagaggcaacatcaacatggcagacctgaaatcccaggcggaagcccataaggacaatctctcctgcatcatggtcacgtacccctccacgcacggggtatatgaacagacaatcaaggaactctgcgacatcgtccatgccaatggcggccaggtgtacatggacggcgccaacatgaatgcccaggtaggtctgacttgccccggctgcattggcgcggacgtctgccacctgaacctgcataaaacctttgccatgccgcacggcggcggcggtcccggcatcgggcccatcggcgtagcggaacacctcgtacccttcctgcccgggcacctcacgctgggccatgaagaaggggccgtagcgtctgcggcgtggggaagcgcctccatcgccgccatctgctggatgtacctctccatgatggggccggacggcctcagggaagccacggaaatggccatccttaacgccaactacattgccaagaaactcggacatctcttcccggttctctactccggcaacaaggggttggtggcgcatgaatgcattctggatccgcgtcagctcactcatgacgccggcctcacggtggatgacattgccaaaaggctcatggactacggcttccacggccccaccatgtccttccccgttccgggcaccctgatggtggagccgacggaatcggaacccaaaaaagaactggaccgcttcattgaagccatggaacgcattcatgcggaaatcacggccattatcaacggtacggcagacaaggaagacaacgtcctgaaaaactcgccccataccgcagaaatggtctctgccgacgaatggcggcatccctactcccgcagtgaagcggcttatccggtctccggtctccttattcacaaattctggccgtatgtaggccgggtggataatgtgtacggagaccgcaatctggtctgcacctgcgacacggtggaggaattctccaaggccgtagagttataaaaatctcatccttcctttcaaaaaggctgttccattcatttggagcagcctttttcttatgttcaagaatcggatttctaatccgaagaaacaaacgcatccagaaaacaattaagcataaaagcagtatgtattaaaaaagaaaaaggcacatttctcctaccctgcttttcctcccctttcattttgatgacccatttgtactcaaaatagagtgttgacttcggattagaaatccgttgagctacgtctcagatgagctttttctctgcccttactgttcctggccttcaacagcatctttctttttccagggaagattccgctatcctcaaagggtatggaattctcttcatgatctttcatcatgtcttcggcttatacgctctacccgcaggtgtggatacggcatggattgctccccagcttaccaaagccgctcccatctttaaaatttgcgtgcccatttttattttcatcacggggtacgctatgggatggaaaacaaattcatccccaaccttcggttccctcattaaaacaggcttttcccattactttaaattctggaaaatttatttcttatgcctccttctggctattctggtttcctgggcattccccttgcccattttgccatccgttgccgacatgggttggaaaaatggcctgcttgtcgtaacaggattgaggccctgttatcccgactggtggtacatggctcttttcgcggcagccaccatggccctttatccaatctgtgcgtggatcacgcatcacattgcgcctgtcccgtccatggcagctctgctgggagtgtcccttttatttcaaagtacggcccacattcccagcctgccgggaatcgcctattccttccctcctttcctgccctgcttcattctcggctacatgtgcgcctttctggcttcacgcctctctgctctttcaatttcccaaagcttgggagcaatcctgttgctggctcttgaaatactatccatccatctcttcagtttttcaaaagccaaaaccctgacggttatctttctcttcaccctctggtgtctgccttggataacccggaaactccgcctcacaccgctcttgacgctgctgggaacttattccgcacttatgtggctgaatcacagattcattttcggctaccacttcagctgggacctctatggaacccaaagcatcagcgtagtattcatcgtgacgctggtctcttcccttctgctggccatggccatgcaaaaactttttaaccggatgattccctcaaatccgcaaacacagtcaaaaactttgtagcaactttacaaggtccggattccaacacctcttaattccaagggggatctccgtacttattttctccaatccggctttccccatgggataaataccacaacagcagccaccctatgaagggaacggccagaaaaaccaggaaaaagccgctcctcccgacatcatgcagacgccggaccatggtagccgccagcggaatagacagcacggcgagcaccacgtacagcagaggggaaaccagctcaacccacggaaccagggacgggaacaaaccgcattccgcaaaagaggggactcccgccacggccagccacgcaacccccactctggaaaaaacctcgtgcaactcccctttcccggcacggccctcaaaacggcaccatgccttgatgacgcgtatccagtacttcttcctgctccagccggagtcggtgcctccaggctctgaaccgggatccggcagaacggagggctccccatcatcatccataacagtcatggaggggataaaagaggccagaggcctccagtctccgccgggaaccttccggaccaaagtccggttggacaggcggccgaggttacgggcccgcagcaaaagcaccaggtcaaccgggcctttggaagaaccgtcaattgcctgatactcgtacagatcgctcatggggacgcttacctggattccttcccgtggctgaaggcggaggcgggaatctcctgcttggacaaaccgggaccttcccacttcaaaaccagtttggaggcagtaccggagttccccacatagccgatgcggatgggatgaagtccggctttcaaataaacgggattcttccggtcacccagatcggaggagacctcggcccccggctcataagttttgtccgcgtcaatcaattccatgccgtgcagacggacaaaagccttgctgcccttattttcatccgtggtcagataaaacgtatatgctccgtcctctggaatcttcacatatcccgtcagctccacaccgcgcttgtccgaaccgttcattttcacggatggggaaggcgtcacgccatgggcggaagcaggcttcttccactggcggaaatccggtacccagggaaaatccccctcatacaaggcccatcgcaacccgggagaaacggttcccttcacatccacggcaggcaccagcgcagaatcaaacactgttttggaaggaagggaagcccggcgattggacaaagcggcggctttcatgcgggcctgaagttccggcttggaggatgcgagatctttgctttcctgcggatcattcaaagtatcaaaaatcatgaaatccttgtccgcatccttcacccccatgcgcaagcctttcaatccatccacaaaaacaatctgctgctggcctcgctgcgctcccttgtgttcgcccaggaaatccttatactccggcgttttgccggcgaaattatattcggcataaacaatgccgggcttctgctggtccgcatgaccggtcagcgtcggcagcagggaaacgccgtcactgcgggctggaaccggcaccccggcgacatccgccagcgtagccagccagtcatggaactgtccaggatgcaggctgatctgccctttgggaatgcgggcgggccagcgtaccagcgtaggcacgcgcatgcctccttcccagcaatcgcgcttaataccgtccatcatgccataactcttgaaaaactgcggattttgcgctccgtgccagtgcctggggtcggagccgccctcattgtgggggccattgtcggacgtgaagacgatcatcgtattatcgtcaatcttcaaatctttcagcagacggatcaaatcagccacggcatcgtccacgcggcggatcatggtggaatgacgtttggccacatcattcgggaaacgggaattgtccggatgaatataggtatccttattcttttccgccctggcgtcaaaagccgtattcacggattccgtgccttccttctttacccattgcaggcctcctttcaatccgccgccggaaggatagggaacccccggaaccaccagattgccgtggggcgccggaaaagccaggtacaggaaaaacggctttccggtcttgcgggcggacttgcgctggtccacaatccactgcttggcgcgggcggcaaataaatccgtggaataagccgtctggggcacctggtccttgatatttttccactcgggattggaagcgtaaccgttgtattcgaaaacgtcacgggattcggaaggatagtgaaaatgccctgccaaatggtccaggataccgtaaaaataattgaatccccgctgatgggggccggcggtcatgggcacatggctctggcctccgccgcccacaccccatttgccaatggcagcagtatcatacccggcatcacgcatcacggtacccagcgtatgggaatcttcaataggctggtcgaaacggttgtttctcaccacgcgggaattcccctggtgcacccctagcagcagggaggcgcgcgccggagcgcaaaccggagcggcggaataatgacggcgcagctgaatcccctcccgagccagagcggacagggcaggagtcttgaactcgttctttctctccaccgtccggccattcagcttctgctggctccagttggaatccagatcaccccagcccatgtcgtccaccagaatgaaaataacattgggttttgaagttttgacagaccgggcagccggcttcgttgcctgcccggaagcacccatgcacggaaccagggaagtcagaagaacggatagtaaagataccagcttcatgattcaaagaaaatagactctaaaaaagacgttaaaataaagcgttatcttacatgaattttctcatccctcaagaaaattacgaggaaagggcacagaggattgaatcgccagtattatcggcaaaaaacatcagggaaccagccttcacagccggaacaactacaacccgccatactgcaccaatgagcggcttttctggctgaagccaggaatgggagaaaattcctcctgcattcccggcgccccggtcaccagccccgcccggccatgctttatcctgaataaaacggcagtccccccgccgggcagaaaatacagaaaccggcggaaacagcaatcatgaaccggaacgttccaaaatgtccgcgccaattccggaacagcgttaataaccctgtccggaatagcgaaggcatcagaaacgcttcttcctgtcgtccctgcgggaacgttcgccccagcgttcgccgcggtcactgcggaagcccccgcggtttcccctgaatccgctccggtcactgcggtcccgctctccgcggtaactgttgcggaatcctccattgcggcgggaagagcgcggagttccggaatattccggagcccccttgtcttcacggacattaacttcatagccgcagacggtagccgtcgccagggcctccagaagcaggggcgccacggaagcgtccacttctatcagggaatgcttggggaaaatccggatatcgcccacggctcccttttccatttccaccgtattgtaaaataacccggctatgtctttgggccgcaagccaatcatccggcctccattcataaacagcgtaaccgtatcccccttatgctgccaggaatcacccttctgcgggctctccgcctcctccccggtctgcggcatacgccgcgccctgcgggcgggcttgtcttccggaatgggctgcacttcccggtgcgtacgttcccggagcaagtcaaacagggccgcagccatggcctccggcgcagcctccacttccttcaattcctccggcagcacggcatccggcttgagacgttccaggatatcatccaccagggactctgtccggagctggtccacctgaacggcagtcaacacaggttccggagtcaacttaacgccgatgaaacgttcaatgcggctcatcagggaaaaatcacggcgccccacaaaagtgatggccttccccttgcggccggcgcgtgccgtgcggccgatgcggtgcacgtaatcctccggatcacgcggcaattcaaaattcaccacggcatccacatcgtccacatccaggccgcgagcggcaatatccgtcgccaccagaaggcgcaggctccccttgcggaaggaatccatcacgcgctccctcatcatctggggcatatccccatgaaggcgatccaccggataaccgcgggccgtcagaccgtccaccacgtcatccaccacctttttggtattggcgaacaccagccccattttaatctttccggtgtcaagcagccggctgagtacctcaatccgggaggaaaacaccacttcgtaataaacctgttcaatggtaggcaccgtcagcgtaggccgttcaatggaaatctggacgggctccttcatgaacctgctcaccaggcggctgatttccggagacatggtagcggagaaaaacagggtctgcttcgcttccggcatagcgtccgcgatatgttcgatatcttccagaaaccccatatccagcatctcgtccgcttcatccagaatcaacatgcggagaccatccagccttagcgccccggactccatcaggtccatgacgcgtccgggcgttcccaccacaaactgtaccccgcgcctcagggcgtccagttgcggacggaaagaagagcctccgtaaatggggacggcggaaacaccgtccatgaacaaagccagcttgtccacctcccggcaaatctgaacggccagttcccgagtaggacagagggccagcacctgaacgcagcgttcctcaggatcaatgcactccagggccggaatggcaaaggcaagcgtcttcccggagcccgtatgggacaaccccacaatatcggcccctccgatcgcggcgggaatcgcctgctcctgaatggaggaaggggtatcgaagccgagcacttcgatagcctccagaatctccggtgaaataccaagagccgaaaaagaagatgtttgagtcatgggggaaaaatgatctgtcagagtcacgggagaagctgaacattattccctcccgtgtccagccaaaagaacggaagataccgtagatgccacgatttccgcaaagccgcctgcgaataaaaaaacggatctccccgcttctggtctttactgtcacacacggggttgcaacttgcaggggcgcattcgcgtatgatacaaatatttccctccgaattcatggataaaacgccaaacaaatcacagtcctccctgctgggaattttcatcaacatcctcctcccggtactgattctggactactgcagcgcgggccccgccaatcccctggaacgtccggagggagaaagtttctggcacatcggcccggtatggtccctcgtcatcgccctttccctccccctcgtctacggcatccgttccctggccgtctccaggaaatttgacctgatgtccgtcgtaggcatggccggcgtgctgctgacgggcgtcatcagcatcttcgtcatcgggccggaagggcgcatccacagcgccacaccctggctgttcgccggaaaagaagccctgatccccctcatcctggcggcagccgtcgtcgtctcccgctccaccggcacccccctcctcaacatgttcatctacacgccggagttattcgacgtgcgcaggatagaacaaacggtggccgccaacggcgaggaacaggcctaccagagcctgctggcaaactcgtcatggattctggcgggcacattggtcgcatcctccgtcggcaatttcttcctgagcctctctttcatgtcctccgtcatacgccagccggaagcggaacagcaagtggcctacaatgccgctatcggcagcatcacctggtggggcttcctgatcatcgggatccccattctggcagctcttgtcttcatcatgacccgcctgattaaacagctcggcaggctgaccgggctctcacgggacgaactccttctcaaataatcctcaaaccatgcgcctccatacttcatgcatcctggctgccgccatcgcccttaacgcagcgtgggcggacgccccccggttcgaccggattttcggttcccatatggtacttccccacggaaaaaacattcccgtttccggcacggccgcccccaacagggaaataaccgtcacttttggaaacactgctctgaaaacaaaaaccgattccaaaggaaaatggagcgtcacgctgcctcccatgcctccctgcggcacaggccagacgctggcggccgtgcaaaacggagactccgccaaattggaagatgtgctcgtgggggaagtgtggctggcttccggccaatccaacatgctgttccgcctgaaccagaccacgacggccaaagaagacatagcggcttccggagatgaccagctccgcctactcaacaatattccgcaagcccacaccaacaacgccccctactccgggaaagattttgacgccgtcaccacggacaacttctataaagggcaatgggcctccagctcaccctccacttcaggccccatgactgccgtgggctactatttcggaaaaaaactccgcgaagggctgggcattccggtaggcatcattcactcctccctagggggctcggaaatcgcagcgtggctccccagggaagtcattaatgcaaacaacagtttccgcaccctgcgcggcaaccactggctggactccccccttatctccgactgggtaaggggacgggccagaaaaaatatctctccgcgtctgaatcagggatctccggaccatccctacaagccggcgttcctttacgaatccggcattgcctggacaacaccactccccatcacaggcgtgatctggtatcagggcgaatccgatgcggaaattattgacaacgcccaaaacggcatgctgctgaaaaccatgatctcctcctggagaaaagctttccgcaacccggaaatgcccttcgtcatgatccagctcccccgcattaacgatccgtcaaaaatccgtgccggatggccggaattccgcgaaatgcaggacacagtggccaaaaccgtcccgcaggtttacagcgtcaacaccattgatcttggctccaccaatgccgacgttcatcctccgttcaagcgccctgttggggaacgtgcaggaaatactgccctgaacaaggtttacggtaaaaaggtcccctgtgaaggccctgccttcaaggccttcaagacctccggttccagcatcctggtccagatggaacaagctgccggactgaccaccacggacggcaagaaaccggcccagtttgaaattgccgggacggacggaatttaccatcccgccacggcggaaatcacaaacaggaaaggcggcacagccgttatccgcctctcctccccggaagtaaaatcccccaaaaacgcccggtattgctggaaccgtttcgtgacccccaacctggtcaacggcaaccagctccctgcccgtcccttccggacggacgtacccgttctgaaaaaataactcttaccacgccatcattccatgaaccttcatcttttccttgcttccctggcagccacgctctcactgggcattgcggcacaagcttctcccgccaaagtggcctgcgtaggggacagcatcaccttcggctccggccttaaacccggagaagcccggtatccgcaagtgctcgccacgctaatgggcccggactttgacgtcagaggattcggcaatcccggaaaaacggcgggcgactatccgggccaagcaggacgctggtacggcagcaccagggaacacaagcaagccctggacttcaaggcggatatttatatttgcaaccttggcattaacgacacaggccgatggtggaaccccgaactattctccaaaggctatgaagcgctgctccaggcatggaaaaacgccaatcccaaagcacggttctttgcctggggcctgctggggccggactaccgcggcccgctcaacaaaaaggcattccccggcaactgctatccggacgtacgcaaatatgcaggctcggacaacggctccgccgccaaccgtccggaagcggaaaaactgattgccgccgtagcacgcaagtacaaagtcagtctctttgatgcgctgcacccgctctccgaccatccggaatggtatgttgacgggctgcatcctacggaacagggcgcacggcgtattgcggaaatcaccttcgccaagctggcaaaaagcctcaagattaagcagcccgtccccaggctggaaccgggtaccggcaacgtgatcatcaacaaccccggtaattccggcattcttctggacggatggaaattgacggacggctccaatacgctcatttttgaaaattccaccgtcatccatcccaaggacaggcttatcatcgccattggcccggagacccaaaaagacccgaccgggcccctgcaaatcaaatccgccaaatcccccgcagctttccgcctcattcccgcaaaaaaatattaaaaaccactggaacagtttcattgggaacatacggaactgttgcatgttcccaaatacccggcgcactctattcccgccctcacgcaccggcggcaggcggcaagccgcggaactctgcggggcatccggattccccgcaaacgggatgcctgcgtccgggacagcttccccgctatcccggatgctccttttcatcctattttaattgagcatttctgcatccaaaacggtctaccgtgcatggaacagaataaaagcaaaccatccgcatgccgcctgcttggccccttggccaccaacaccagtatggatttcggcgttctgctgctgcgcctgggagtagcagtcatgatgcttgtgcatggcattcccaaactgggcatgctcatcagcggaaactggtcggccttccaggatcccttaggaatcggcaattttctgtccctgctgctgtgcgtaggtgcggaattcggttgctccatcctcattttgcttgggttcctgacccgcctggcctcccttatcctggttattaacatgtgtgtggcgctctttcttgtccttggcctctccggctggggagcacaggaactagcggccatctacctgctgatctatctgaccctcttctatacgggaccgggcaaattctccctggatgcctggtggctctggcgcgactgcaagatagaagtggaatgaaaacagttcctcccgcgcgtcctatggcaaaaatacttcttttttcactcgccgcggaaggagccttcctctaggatgctggcacacccagtccatccgttcaatgtccggcaaactaacctacaagcaatcgggggtcgataccaaggaagcagccgcttttgtatccgacatcagctctcacgttaaaagaacgcaaaagcagagatctctgcaccaggcctttggccttttcgccgccgcctatgatttgagctcctacaaggaaccggtcatcgtcaccgggtgcgacggcgtaggaaccaagacggaaattctttttgaactggacatggtggaaaccgccggcaaagacctggtggccatgaacgtcaacgacattcttactacgggcggcgaccctctccttttcctggattatctgggcatctccaatctggaacgggaacgctcccgtatcacccgcctggtggccggcatgtgcgactacctggaatcctgcaactgcatccttgccggcggagaaacggcggaaatgcccggcgtggtgccggaatccatcgtggaactctccggcttctgcatcggctgctgtgaaaaaagcaaactgattgatccgaaaaccgtccagcccggagacgtattcatcggctacaaatccgacagcttccatgccaacggctggagcctcatccgccgcattctggaagaaaaaccggatgtagttgatgaagaagaactccgttccctccttcagcccacccgtttgtatcatgacgtagtggaagatatgcgccgcttcaacgtcaccccgaaagcatacgcccacatcacggggggaggcctcccggaaaacctggaacgcttcctgggcgactacggcgcagacctctccattccctattgggacaacaccgccgcccagaaaatcctgaagcatgtggatcctcaggaccgcttcaacacttttaacatgggcattggctgggtagccatcgtgaggcctgaagacgcggaagccgcattgaaggcaggtccgggcggcacggtcattggcacgctgagagaaggccgcggcattcatgtcaaggtacagggcgaataaaaaacatcatctccttgcagcggatacaccacacttacaggacaatcttttcatcatcatcccatgagcgattttcttaaacacgagtgcggcgtagccgccattcgtctgcttaagcctctctcttattttcaggataaatacggctccaccctctgggcgttcaacaaactgctcatcctgatggaaaagcagtacaaccgcggccaggacggcgcgggcataggctgcgtcaagctgaacatgcccttgggacagccttacctgttccgcacccgggacgccagcaaagacgccctcacgagcatcttcaacgggcaaatcaagaagctcaataaaaaagttcgccgcggccaggtcaatctgaaggatgcggcagatatcaaaaacaacttcgactacggcggggaaatcctgatggggcatctccgctacggcacctccggcctctttgacgaagggtcctgccacccctacctgcgccgcaccaactggccgacccgcaccctgatggttctgggcaacttcaacatgaccaatacgccggaattgaaccagcgcatgattgaacgcggccagcaccccgtcttcggaacggacacgcagactgtccttgaagaaatagggtatcacctggatgaagcccacacggacctctaccgcgccttgcgggacagcggcatgcccggcccggaaataccccatgccatttcctcccggctcaacattcaggaaattatccataactccgccaagcaatgggacggcggatatgccatcatgggagccatcggtaacggagactacttctgcctgcgggatccgcacggcatccgcccatgccactacctgattacggatgaattcattgccgtggcctccgaacgcgttccgctgatgaccgtttttgaagtggaaagcgaacaggttcaagaacttccgccggccaacatgctctctatcaaggcagacggcacacatgccattacggaatttaccacacctctgaaaccggctccctgctcctttgaaaaaatttacttctcccgcggaaacgatcctatcgtttaccgggaacgcaaagcgctcggtgcggcattgaccccccaaatcgtggattctctggaagaccgttttgacaaatccgctatcacctacattcccaacacggcggaaaccgcctactacggcctgctggaaggcctgcgcgtctaccgccgcaaacgcgtgcatgcccagcttctggaggccctgagaaacggcaccctggatgaaaacatgctggacagcgctatcctgaaacgctggccgcgcggtgaaaaaatcgcccacaaggatatcaaaatgcgcactttcatcacgcaggaaaaaagccgtgcgcaactggtctcccatgtatatgaccttacttacggcgccgtagggccggaagacgtgctcgtcgccattgacgactccattgtccgcggcaccaccctgagaaggtccatccttcgcatcctgggccgaaccaatcctcggaaaatcgtcattgcatccactgccccgcaaatccggtatccggactgctacggcattgacatgtccgaactgggcaacttcatcgccttccaggcggccgtctccctgatcaagcagcacggacaggcccgtctgctggaagaagtatacaaggcatgcagggaagaactggccaaacccaaggaagaacggcgcaattgtgtgaaggctatttacgaagggttgacggaggctgaaatctccagggaaatcacccgtctggtcactccgcatgacgctccgtgccccgtggaagtcattttccagaccatcgaaaacctccatgaatccatagaaggcccctgcggcgactggtatttcaccggagattacccaactccgggcggatacactacagttaatgtggcatacatgcgctggtttgagggtaaagggggccgtgcatacgatttgcccttgtagcggctccctttttttgggtattctgtcgacaacatgtcgggacccatttcatacacgaccttggaagacaccgaactggtcgccagggcacgggaaggagattcgcgggcttttgacgaacttgtcattcgccacagccgcaaactccatgctaccctgtaccagatgacggacaactacgacgatgcctatgacatcgcccaggaagcgttctccaaagcctaccgggccttgcgctacttcaatggacaaagcgccttttacacatggctgcactccattgccgtcaaccacgccagaaacttcctgaaaaaacgcaaccgcagaatgacctacagtctggacgacgacgagtacggcgaccatacggaaaaggacatgaacatggcggatgaaacggacggggcggacccggaacgccgtacccatttgaatgaattgcagctcaaaatcaacgaagcattgaagaaactttccactaaacacagggaagtcgttgttcttcatgacgtaaaagggctcaaccatacggaaatatccgcccttctcggtatctctgaaggaacgctcagatcacgtctgcactatgcccacaaggaactccaggggctactggcggaatatctaagttaatcaggaaaaaaaatattgaacgtcaattcccgccgccatgtcaaacgcatagtcccaaattcgggactgacacattctaacttctattatacttaacatcaacgacgatggataaacaatccacagatcataaagaggaaactctggtggccatgctggcatctttccgcaaggaagcctgttaccatgacaccttcgaggaagatttcctccgcaattttcatctcagaaaggaaaccgatcaggctgcccactctgcttggaaattgctgctcgaacgcctggacaattatctgcagaactttcgtggttggcagtgggtctatgcttccatgtccatcgtgacattggctgcggtaggcgttattatcgcatccggaaacatggatgaaccttctgaatcttacgtatcctccaccaaggataaggaagaaatactcctgacgaaaaaagccgttcccgtaagtaaggaaactattgaacgaacctcaaccgaagttgctcccacggaaaaacctgaattcaccacgggagactcttcatatgaaacatcggccaaagacaatcagctgaaacctgattcccataccgataaaaaaccggtatcccgcgttctcattgagatgtaacaatccatgatggacctggctccgatattgacgggcatagccgttgcaggcctgatttgccaggcaacggccgtgcctgtcccttttaaggtagaagccatcctcccccaggcggaaggggcgccgtatgcgaccatggcggcgcaaatcggtaaagacatgctggcctccttgattccctaccgggttttaaaaaacggaggcgtgacctaccacctcggggacaagagtaccccgccccttcaggtttgggcccaggaaaagctcacaggcctgacaatctttaaggtggatccagcccatatatacgacggacaggcagacctgacccctcccggcattcttaaacgcggcgacaagctgtcctttgccagcagcaaaaatgagaccacgcagggaatttacgtgggcatggaacattccatcggggacaccagtttccccctgcggctcatccgcgcccagttccccaagctggcagtcccccccatcggccaaccatgctacgactctgaaaaccgtctggtcggcattgttctgggcgtttcccgcaaaggaacctgccacctgctgcccgcccgtgccatctccttcctggcaacccatccggaagccaaaagagtgcgcctgggttgcctgctggacatcaactcctcaacccccgtcattgagggccttatcaacggaggtcctcttgcacggggaggaattcagaccggggacatcctcatcaacatcaacgacacgcccatccgcaactacggagacatgctggacgccacttattacctaacaggagacaaacctctgtctatcgaagtcatccgcggcacccaggtggtaacaagcaagggaatcctccccacgcaggatccccgttaatccaaatccgggctccaagtaaatgccggggccccggacggctcccgctcaaaatcgcccagaaccttctttcaggcttgaactcgcccgccggcgcacttaaaaaagggcgtgcttcaaatcgtcttcaataaaatcagcgctgcggaagtatccagcatccccaccttggaacagctggatctgctcggagacttccaagtctcagaatccaccctccagaccctggatgacgcccgtttcggcaagatggaaaaggatggtaaaattctttatcgctacgtcgccaaagattaccgcatttactttgaagtcatcgaaggcaaagtgatcgtccaccgcgttctgcacgccaacagcctgaacgatttcctgtttcgcaccaatatttccccgactgccggggaagatgaaatcctgagccagtccaagcacttctggaaacttatcgacgaaggcaaaaacgcctccaaagcctgaccttttcccattcatggcctgcatcattctgggcgtcaccggctccattgccgcatacaaggcggcggatatcgcttccgccctggtcaaatacggtcatgaagtgcactgcgtctgcacagccaaggcccttgaattcgtcactcccctcaccctgcacacgatttcccgcaaccccgtcttttcctcctttgaggatgaaaagacggactgggttcccccacacatccaactggcccaacgggcggatcttctgcttgtagccccagccacggcaaacaccatggccaattttgcccatggcttcgctccggacatgctcagttccctctacctggcttgccagtctccggtgcttatttgcccagctatgaacgtccacatgtgggaacatgcggccacgcagcaaaacgcggccgttctgaagcaaaggaaggatcattacatcctcggccccagtgaatccggaattctggcctgcggagcggaaggcgcgggaaaactcatgccggtggacaggattattcaaaaaacactctcccttctgccgtaaggacggcaaaaatcgctccatgcctgtttattggtttgcccccagagaactaaatcttctatcatggacgcatatgaaaatgctcctgttcctcttcggttcccttatgctctgctcctgcggtccggataaatatcccatcagctttcatatggagacgggagcgacggacagcaaaaaattcgcctttgaaagggacggccattactatagcaaggccccctttatttcccataaggacattgaatcctattattccttccctgcgccggacaacacctacggcatcgtcgtcaacgtccggaaaggcctgggcagccgggtggaaggaataaccgcctccaacctgggcaggcaaatactgcccatcgtcaacggccatgccatgcagcccctgcgcctttacagcaaacctgtcacctcaggaaaactggcagtcatgggagggttctccccggcggatcttgccgccatggcggaatttattcccccggcggatcccaagagagaagaacccatcaacaaactggccgccgttaccaagcctcttcttcccagcaaggaccctgctcaggaaaagaaggaggccaaagaccctgaagaacacaaagaccgtaccgtgatcagcacccgccgggggcggatctgagccagcacccctcgtatcagcatgcacggcaaatcctttcctctcctgaccggcatcctcctgtttctttggggcatgccattcctgatggcggatattgtagtgcgcttccccacggaaaatacagccctgctggacaaccgcccgcaggacttttacatgtatgtagaccgcaattttgaagggaagaaatcccagccgtgggaagctggagcctacggctttacccggaccctcgtcagaacccaggcaggccccgtagccgtcaaatttcatgagggtatcgacattaaacctctcaggagggatgcttccggcacgccgctggacgacgtgcaccccgtagccggaggcacggtagtccatgcctccgccaaccccacccatagcaattacggccgctatgtggtcattgagcaccagctgaaggacggcccgctttacagcctgtatgcccatctggcctccgtctcctgcaggaaaggcgaccgggtaggaaccggaaacgttattggaaagctgggatactccggggtggggttgaacaaaacgcgtgctcatgtgcatctggaactctgcctcaagctacaagatgactttgaaaactggtattccagtctgaaactgggcactcccaaccgccacggttcctataacggactcaatctggccggttttgacccggcacccgtcctcctgcaatgcaaggacggggcggaattttccctctctcgccatatctcctccctgccggtccaatacgtcgtgcggtctccctcttccggcgaaccgcccagccttgtcaaacgctaccccttcctgctgaagccggggccctccgaccccaaatcctgggaaatcagtttcacgggagaaggggttcccgtttccgtgactccttccagccaaccgtgcacggaacccgtcgtcatccgggccgttccgcatcctttctcccaactgtacaggacctgcaatcgcgtttccggctccagcaaggaccctaagcttaccgccgccggcaaacgctacatccggctcatcttcatggggcctgaatcataatcctacgatgatgcaaaccttttccagcttccgttttccccatgccgttctcacatcctgcgcggctgtcctgctttccctgggcggcgcttcccctgcagctgccgccccctctgcgggagacacctttccgcaggacaggcaggacctcctgaaaaacaaaaaataccagcagggactgaaagccttggaaaaccgccttcccctggaagccagcaaacacttccaggaatgcctgtcttcccaaaaccttgcggaatcacaaaaagccataatccgcccttttctggcagaagccctgatccgcgccaaaaaaacggaagaaggactgaatgcctgggagcagctgccggactctcccatgaaatcctactggacggcggtaggcctcttcaataaaggctcctttaccaaagccctggaaaaacttaccgctatcccggaaacggatccgctttccctctacgggtttcaattgaaagcccagcttgcgcgccagcttcaggaccggcagcttttactggaaaccctcagcaggctggggcaggcggaatcccccgccgtttcccaccccgcgcgccttcttctggcggatgtactggtgaatcaggaatgttaccagaacgccgccgctattcttgaacaactcaaaacggaaacggaagacgggacggacagcaaccggctcatacgttcatacgccgagctcatagaaggcaagctggccggcaaacagggaaatctggaccaggccatcaaaaccttctccgccgttatggacaacaaatcctatccggaaaaaattcgtgatctgggccgcctggctctcgccaaggcggaaatagcccgggaaaaaagcaatccggaacaggcggaagaggaaacgcggtcccagcctcaggaggaggaagctccgcacaccgccggaacggcggaggaacgcctgttggcgttcattggcggcaaagcggaatccgccttgctgatggacgccttcaacattctgctggaggaagacatctttcgaaccaatccccaggctctggaaaaactcaacggctgggtaaaagccagggatgcatcccgccagccggcagccatgtatgccatgggaagccttcttctggaaaaagatgatctgtcaggcgctgtcaaaatggcggaagaggggctctccaaatatccccagagccttcccgttcaaattctttctctgaataccattactgttttgctggataaaaaccgtctgcaggatgcggaacgtcttatttccaaatatcccggttcatcccctgacctcgtctttcaacagggagccctggctttcctcaaaaaagactactccctggcgcagaaacttttccgggaagcggcccgccgcgcttcggaaacaacggcggaaaacgccttgttcaatgaaaacctggccgccctgaacgccaatgacgcctccggagctgccgctctcatcaaggaagccgcaggctcttcccggctccgggagagcatcctctttgaacaggcccattacgccgctaaaaggatggcccctcaggctgctgaattgctggcaaatttcataactctggcggaaactccggccctgaaaacccaggcgcggctggaccaggtggaagtagccctgaatctcaaccctccggatctggaaaccgtgcaggctatccttcccctgttggaaaaagagcagttgtctccggaacagaccatgcagctggcgcggctgaatattctggaggcggaaagccggcaggaatggcccaacgccattcagtcctgccgacgagccattgccctggattcggaaggcaaacaggcggatatgctttacctcaaactgggagagcttctgtacaaaaacggagacttccatgaagcgcagcttgtcctccagcccttcccctccaaataccctgacagccctcttcaggcggcagccctctttctggcaggaaaagccgcccagcaaagcaataccggcagcacgctgaacgccgccctgaacatcttcaaaaccctaggcacgggggacaccccctttgcccagcctgccagaatagaagaagcctccgttctgctgcgcatggggaaagcggaccaatgcatcgccgccctggaaaacctgctttcctccccattgccgcgctacatgcgcctgctggccctctccatccaggcggatgcctgggtagctaaggaagatacccattcggacactctttgcaaggccatcaacctctgtacggaaatcctggacacgcccaacctgggactggcctggaaattcaaggctctgacccagcgggcccagttctatgaacgaatgaacgaacaaaaaaaggcgctggatgactatgcctccattctggcccatacgcccagcggaagttccgccaacaaacgcagggactggcactggttctacaacgccggcttcgcctccatccgcctgctgggccagcttcaggactgggacggagccctggcactggcaaaaaaactggcgcagacttccggccccagagccagggaagcagcggcttacgcgcgccgcatccagctggaacatttcatttggcaggatgaaccggaagcccctgcgccggaaaacggaaagccggcaacaccggaccaaaccgcggattaagaagcctttcctcctgtcatggcccccccccacacagcaaaaaactggagactcaacgcagcagccatcatcatggacgctgaaggttgcgtattgctgggcaaggacagcggccgcaacccgtactggcactttccgcagggaggcgtcattaaacacgaaagcattgaacagactcttgcgcgggaggtatgggaggaagtgggcctgcgccccacggaatacaccattgtcagccgcctgtccggcctgcgttacaaatacccttccggcaaccgtaaagttacgcgctggataggccaggaacaaacctactttcttgtgcgctgcaaaaccagacgccctaaaacggatttgcaccgcagccccgaattttcaaaaacgaaatggattcccctccagaatctcaaactggaaatgttccccaaattcaaaaggaaagtcatcaaaaacgcccttcagcaattcttcgggcccggctttccttccaaacacgccgctgtgaaaacatcttccccctcctcaccctcatcttcaacactaacttcgcgtacgatgaaccgttacctggtgcctccgggcaaaaaactgcgtttaaaggattattctccggatgacaaatctctcttctccggaaccaaggaagaatccctgattgaattcgacaaactgagggaagaactgcaggaactgcaaaaaaaactttttgctcagcacaagcacaaaattctggttattcttcaggccatggatgcaggaggcaaagacggctgcgtcaagcatgtcttctcccgggtggatccgcaggggctgcacgtagtccccttcaaaaaacccactactgaggaactagaccacgatttcctgtggcgcgttcacaaggaggtccccgccaaaggacagatcgccatcttcaaccgttcccattacgaagatatcattgccgtccgcgtgaaaaaaatcttcccggacccagtctggaaacgccgctacaagcacgtcctcgactttgaatccatgcttgcggaagaaggcaccgtcatcatcaagctattcctgaatatctccaaggcggaacagaaaaaacggctggaatccagacttcaggacccggataaactttggaaattctgcatggatgacctggatgaccggaatcgttgggatgaattccagacagcctaccaggatctcattgaaaaaacgtctactccggaagctccctggtacatcatcccggcagaccggaaatggtacagaaatctggttgtcgcccgcctgatggtagaaaaactgcgccatctccagctttcgctccccactcccaactttgatcctgcctccatcatcattccagattgacaaaatctgtcataacgataactaatttgtgcatcgtaaaattatttttgtacatttctcggtattcagttgtcccattattacaaaatctgcattattcacaataacaatcaaaacttagaatttctaacgcttgactgttctagtgaaaaattgttagaaaacaacttaacacctagaacgtgtaaacattctacatagaaaaacaaaatcaaatgtatttagcatcccaacgcaaagagttcattttgaaaacgctggctgaacatggagctgcaaggaccattgctctggccaaacagatgaaggtcacggatgaaacggtccgcaatgatttgattaaccttgaaaaacgcggcttcctcaagcgcgtccacggcggcgcactggcgcttactcacaaatccctccatgaagacattgtcactcaagatgatgtgtctatcaggattgcaaaaaaaaccgttcagaatattcccgcttccgtggttatgttcattgacagcagcaccatgggctaccagatatgcaaccacatcaattccaaagatacgcatgtggtttccaacaaccccacgttgctgacccggcttgaaggcattccgaacctgagcttctattgcacgggcggacacttcgaccgcgaagccctggtctatgtagggcaggacgccgccaaggccgccggatccctgagcattgacatggtcgtgctgacgccagactgctactcccccaagcatggcgccggatacaagaacatgttgcaatccgaattcatcaagagcgtcatccccgcggatgccaaggtaatcatcgccatgccctccaccagcgtagcgaacaacccggcattctataccgttgcgccctcccaggtttccatgctcatcactgatgaggccctttctccggaaatggccgaccagattgaaaagagcggcgtcaaggtggaactcgcctaacgccggcctgctttacagggggcggaagttcatcggaacttccgccttttttataacgatcatatcctctctcttttccattccatccggtactcccggcttcccgtcagctcatcttccctggagccgatttcttcaaaccctccgcgccgatagaatgcgcgggcgcgggcattctcttcatagaccccaaccgtcagcattcccttgctgtgtttcttcacccagtccagcaacgctgtacctattccttcacactggcgttccggcgccacaaacagagcggccagttccccctcccccaccaggcaggcaaacccgacaacacggccaccgtccctgcacacccatgtacgcgccctgggcaggtacacctgcctcatatcttccaccaaaccgcaccagaaccccactcccgcaaaagagtgggcttgttcggacgctttcagccaaatattcaaaacctccgtttcatccctattctggtaatgttctatcttcatacatcaataacaggaatgcagcaacccttcctgtagtttatacaagctagcatggaggaggcatggaactcaagaaagaaagtcccgccttccggtaaaaatgaaaggaaaggccatgacggacagcttttttccaccctttccccctcaccacatcactgtcccccggatcatggaacacaaaaggccatctgaaagagctaccagcctttccgcccttcaactacggcctgtacacaagcaccgggccggtacgcgaagactggacgcagcgcaccttccgaacagcggagcccaccagggctgcagcctgctccacctcttcctgcgtcgtcatgaaagacagggaaaaacgcagggaggaacgtaccgcctcatcagataatcccatggccgtcagcacgtgggaaggcatcggctgcagcgtatggcaggcagaccctgccgaacacagcagaccagcaggttccagcaacagcatcagcgcttccgccgtacatccgtcaaacgccagattagaagtattgggaatacgttccgttccgccggaatgcaccgtcacgccgcccacctgtgtccgcaggagagactcaaaagaatcccgcatccgggacagccgtccggcgtcctcctccaaatgcctcaatgccgcccgcgccgccgcaccaaaaccaatgattcccggaacattctccgtgccggacctcaagccgtactcctgccccccgccgaacagcaaaggggaaaaaggagcccccgctctcctgtacagacatccaatccccttggggccatggaatttgtgtgaggatacggaggcataatccacttccattccatgcaaatccacgggaatttttccggcgcactgcactatatccaaatgcacgggaactccatgcttcctggcggaggaacacaaaaccggcgcatcctgcaatgcgcctgtctcattattggcccaggcaaaagaaacgccggatacgccccctgcgcacatcgactcccatttttccggaatcgctctcccttccctgtccacggggcagacacagccgcagcccagggccagggccgtcttcaaggaggcgtcatggtccgtggacaaaacgcctatccccccctcctgtcccccggccatctggcggaaagccatattggacgcttccgttccgccggaagtaaatacaatttccgaaggaaatgcgcccaacagagcggcaacggccgcacgggcctcctccaccgcctcacgcacatgcctggcacagccgtaaccggcggacgggttgaaaaaccgttcctttaaaaacggctccatggcctcgtaaacctccggagccagcggtgtggtggcgttattatcccaataaatcacgccttcataactcccccaatcgcgggaaggagtcaagccggaacataatgcgcagttgcacaagatcactcttcacttttacccgtgattccgcataatgcctctcatgcgttttcttatcacggcaggccccaccagggaagctattgaccccgtcagatacctcaccaaccactcctccgggaaaatggggtattgcctggcggaagcggctgttcacgaaggccacagcgtccttctcatctccggccccacttccctggacattccgcacggcgtggacttcctgccggttgaatgtgcacaggaaatgtatgatgctgtcaaaaaccaggctccttacgccgacgccgccatcctcagcgccgccgtagcggattatcgccccgtctccgttccggaccgcaaaatcaagaaaacgggggaacgcatgattttggagctggaacgtactgcggacattttgggctccatgcgtgcggaattcggcttcagcggcattctggtaggctttgcggcggaaacccatgacgtggaaaattacgcgcgcggcaaactggaacgcaagcggtgcgatatgattgtggccaacgacgtttcccgcagtgacattggttttaactcctctgaaaatgaagtgctgctcgtttacccggaccggacggagttcctggaaaaagcgcctaaagcacaaattgcccttcaaatcattgagcgcgcttgccgtctcgcacagggaaaagctccgtcatggcgcacggcagacccgttccacgcttgaagcggcagggagtttgccccacgatccaatgccggcatgtaaatgccggtcacctttcccagaaccacattttcacttttcatgcccgtcactcttcaggatttaggctggaacgaccattttcaacgcgctttcgacgccgttgccaaaccaggctggatgccggggcgtctcatccgggaaacgaaaatcaacttcactgctcttctggacggcggggaagatgtggacgccgtcgtcagcggcaaactctggcatgatgcggccacggatgcggaactgcccgctgttggagactgggtggcgattgatccgggagaagcgggagacgaagccgtcatacgctccattctcccgcgccagacctgtttttcccgcaaagctccagggaaaagcagcgcggaacaggtattgggaaccaatgtggatatcgtggccgtagtgacggaaccgggaacggatttcaaccccaggcgcatggagcgctactttacactcatccgccgcagcggagcatctcctctcatcctgcttaacaaaacggatcttttttccagggaggaagtggaaaacgccatgcagattctgcgggagctctccccggaatgcgccataatcagcatcagcgccctgcacaacaggggaatcacggaatcccgcaaatgcctatccaagggaaaaaccatctgcatcgtcggctcctcaggcgttgggaaatccaccctggtcaataccctgctgggggatgaatggctctggacgggagaagtcaatgaagtaaccggcaaagggcgccatacgacagtggcgcgggagctggtgctcctcaagcatggaggtttgctgattgacaatcccggcatacgggaaatccagatgtggactgatgaacataccctccgtgaaagctttgcggatttgacggagctggcccatgaatgcaaatttgcggattgcagccacggtaaagattccggctgcgccatcaggaaagccgtggacgaggggaagctggacaaggagcgatacttaaacttcctgaatttggaaaatgaaatcgcccggcttgccaaacgtcagaaaaaaaggcaaatgaacgtggaacgggccgggaaaagagaccggaaagtgcaggcccggaactatgaagaccgcgtggaactggaacgccgccacaagcccaaccaccgcagccatgactgattcgccgtcaaaattggcttgtcaaactgcaaaaacacacctaatggtgaagaatgctattttcacgcagcctcatccgaactttcctggctcttctggcattgggggcgcttcccttatctgcagaagaacagccggttcctgctcaaggcggtcccgccgtgtccattactgacctgaagcccgtaaagctggagagggatgcccacagcaagcttcttgtagcgcaatgcactgtcaatggggtcccatgcaatcttattgtggacacggcggcttcccacaccacatttgacatcaaattcatcaaaaagaattttcccggcctgccgcttgaagacgttcaaatcgcccccggttccaacgtcgatgccgtcccccggctatttgccatgcggtccttctccatgggcgggcttcatattaaaaacttcttcggccttgccctggatcttactcccctgcaaaaggacatgcaggtgaagatagacggcatcctgggcatcaactacctggggttctctccgttcctgctgtccgtcagaaatgcttccctgcagtttctggaacgctcccgcttcccccaacacatgaaaccgctggatgtggaacgtgatccttccggaattttttacatccgctgttcccgggggggagacactttccctctggctcttgactccggctcttctctttccatggccccgctggaacagtggcccgcagatccggacggcaatcagctcaccaccaaggcgaccgacattaacggccacaatgggaactgcactgtcatgaaactgggtatcccctccacgctccgcatgggaccggacttccaaatggacggcctttccttcgccgtaacgggaacagggggccgataccagatcggcgtggatactttccagcattttgacatcatcattgatgctccgcagggggaagtcttcgcccttcctccccattccaggccggagccccaggggcaaaaaaaaaccgatatcaaacaggaatcttgagcatgatgcagatcatgcgaatggtccgggccgtagcgccgaaatgggccttcaacgccacctgggcgcgggaagactgggcatgagccagcagggggttgtccagcatctccttgagcacgtccgccaggcggttttcatcacacctggcaattccgtccactccttcaagcagctgaaccagtgcatcgaaattttccatatggggccccgtcagcacgggcacgccacaggcgacggcttcagccggattctgtccaccgtccgccaaaaagctttttccgatcacggctacatccgccagcgcggtccagtccctcaattcccccgtcgtatccgcgatgtaacaaacatgatccttcagggtttccggaatctcgccatcagtccgcagcacgcactgccagccctgggcctccagttcccgcaccacggcatggcggcgttccgcatgcctgggcacgatcagggggaagccccccgccttgcgcgccgcttctgcgatcagaacttcctccccgtcatgcgtgctggcggccagcactacaggcttgccgcgtttcagtttgtccaaaatggaggcaaactccgcattagtctccctgcgctccgccatttgctggtcaaatttgatgcttcccgtcacgtggataatggaggaacgcacgcccacggattcaaacctccggacatcccccttgtcctgtacgcccattgcgtcaaggaaggaaaaataatactttgaaatccatttaaatgcgcggtagcggctctcggacctggcggacatacgggcattaatcatcgccatgggtatgccgcgcaccttggctgcacgggcaaaattcggccacaactcggcctccaccaggacaatggcctccggttcaaaacggtcaaaacacctccccggcagccccagaaggtcaaagggggcataaatcacgcgcacgccgggaatctgcgcactcactgccgtagcatgccccgtagccgtactggtagccagcacggcggaacctccgcgttcccggagccacgcccggagaaacttgagagccagcaccacttcacccacgctcacggcatgcacatacaacacccctttcggctcccggttataggagacccggtacagcccgaaacgctccagaagccccgtgccgaatccgcctctcctcttctgcttaagcagataggaaggcagcgttaccagccacccgacggtatacaggatattgtaacagaaggaaaacaggaaggctttcatcttacttctcaggcaattggtagaacagcagcatatttttcccgtaccggcgagtatccaccagattcaggccgtcaatttccgcggcgccttcccttccggtaccccagccctcctgcacttccgcaataaacacgccaccacccttcaaaagtccggcaactccggcctccgccagttcaacaataaagtcgcggtccgccggccccttgcaataaggaggatctgcaaaaataatatcgtacttcctgccggccagcagttcccttctcacgaactggacggcatctccctggatgacagttccgccttccaagcccgtcttgacgagattggccctggccgccgcgcaggagagacgggaaaaatccaccatgcgggcgtctctcgccccacggctgagggcctccaggccgaaggcgccggacccggcaaataaatccagcacgtcggcccggtccatcagcgggttcaggatggaaaaaacggcttccctgacccggtctgtcgtgggacgaacttcccccttgggaacagacagggttatgccgccggcctttccgctgatgatacgcattgttgtcttaccggaaatgaaaggaacatcatatccctactggcgagccttggccttagccttttccagcaaagggtcacccgcgatgcgggtaacgggaacacgcagaacgatggactggttggcaatggcaacgttgtccgggttcttttcagacatgttgtaaacgaaataggcatacttgccgtccttggtcttgcccgcaatgatagtctccgtcagggtggaaagaatggttttcttttccattgtccattccttgccgctccacgcgccgtatacattcagatcgtcataggacacgtcccctttcagggtcagggttccgttgggagaaatccaggatttggtactggaatcatatttcagcgtgctcatcggcaacggcccctgctgcgccacagcagccaaatcccagatattacgttcccccgaggcgaaaatacccagggccacaggggccacttcctgcacctgcttcagcttccagcactccaggtacttggcatattcgtccttggtccagcccaggcgctcatcataaggaacgggctggccggggacaatctggctgacaagctccttcttgtccttgtcgggcagggaggcgaaaacgccgtctatcttttccatgaacggctgcaggctttcatcaagcacaacgctgacggcggcggcttccgccattttgccgaccgggagatattcgtcaactatttccggcttttccgctgcggacagggaggaaaccagaacagggactatcagtgttaaagccagattacggagcgctttcataacgtgttcgtatattttactcaacaaaagacccttggcaagagtcaaagtgagtgttatccgtatgtacatcatgagttggaagttacttttcactaccctgtccgccgctctgagccttgcttcctgcgtatccaccccggcatcgcgcatccaaaaaaacccggcccttttcaattccctcccgcccagccagaaaacactggtggaatccggacaaattgctgaaggaatgtctccgccggccgttttcctggcctggggggacccctccgccgtagcggaaggccaccttaacgggaaatccgccactcgctggatttattcctccctccagccggtttacacccctcccccctctttctgggccggcccctactggggcggtccctactgggggccgggcttctatcgtccctattatccttattacaatgatgtcacctatgtgccggtaaacaccggatacgtgcttttcatcaacggcaaggtgcaatcctgggaacgcaggcgctgacggaaacggaacctgccctatggcacggaatgcgccggcgcagcagaaggagggcaatctcccgctgatgcgccgtttttctctccgcgtttccgaatgccgctctaatccccgcccctggacagggggcgttccagttcctcccggaatttgggaaagaactccttcaattccccggaaaccttcggatattccagcctcatctccgccagggcctccacaatggcgcacatgcagacaagccgggaataccatttgttgtccgccggcaccacataccatggagcctcccgggaagaagtatggcgtatcatctcctcatacgctttctggtactggtcccagaattcgcgttcgtgaatatccccttcagaaaacttccaatttttgtccggagtatccagccgtgccaaaaggcgctttctctgttcctctggggaaaggttgaggaatattttcacaatgctcgtcctgttggcgagcaggtggcgttccaggttattgatggacctgaacctctcctcccagaaagcactcttggcatgggagggattaaatccctccccggccagaaactccggatgcacgcgcacgctaaggacttcttcataataggaacggttgaaaatgccaatcatcccccgcctggggaggcgtactacgcaccgccacaggaaatcatggctccgttccagcgtggaaggctgcttaaagctgctgactacgcacccctgcggattgacgcctcccatcacatgcttcacaatgccatcctttcccgcgctgtccatcgcctgcaacaccaccagcagcgcatgagactcgctggcatacaatacttcctgaagctgctccagcaattcgatgcccttttccagcttatccacagcctctttcttgctgtctttgcccagcttgccgagatcgccgggatcatagcgggacaacttgaatcccctgccgtccgtcacccggtacggttcaataaatttcctgcatcttttgaccaggcgggaagaaatatccatcattcctataatgacactgtctcttctcaaaatgttgaaacaacagcaaaaacatcaatacccctctcgttgggagattccaccccgccgatagatgacaaacccccggcataattcggaacgttcatacttgccggaagactctatggactggagaaaagcagcataatcggatggccgggaaactacgatcaccttataatcagaccatttgtcctttaacgggccgggaatccatccataaaactcctttccggctccattgcataaaagtaaaatgtcaacatgactgctctgcaataatttgcaataagataccgcagagcggaaatcttcacggccatacaaatcattgcaacgaatacgaatatcgctcaccgcccaaacaatcatcattaataggaacaggatagtttgggcaatcctggggaacgaccaatcccatgacgccaccagggaccaggccagacacaatacaggcaataacggcgcgcaatgccgtccggaaaaacggaaatccatcatttccgttccataaaggaatacggcccctggaagcaatatcaacaccagcaaagcaggaaccaagggcctctcagcccgcttattccacaaaatgatgccgcaggcagaaccggccagaagaatggcgccggagatcatccctgcccccaatccgttcatattccataaagcatcaggagtcatgcacatcctcaattctagacgggaaggccccatgccggccaatcccgataactcgtacatggaagcgcatgcattgactatccaggaggaagatatggaaaccgcacgggcgcccaagaaaagagtgtaaagataatatgctcccaacccggaaaatggaaaaatccaccagagcagggctcgccgaaacctccgccctccaaactgccggaatgccatgaccatgaatgccgcggcaaaaccgagcgcccatacaactcctgtcaggcttgtaagacataaaaaaaacagagaaccaaaaaagacatggaattttaccggttctccccggctaacctgccaaaacaacatggagacagcgcaagaggccgctatctgcaacatatagggccgcaactcgttagaataataaacaaaaaacggtgaaatcaaaagaatcaccagcgcctttggttcctttctgaaaaaccaggatgataaaaatacccagaatatattaaataacctcagcatccattcagactccgcacccgtcagatgatgccacaaaaataaaaggtagtaataaaaggccatttgagcatcgctaccgccaatttcacaaatcttcttccaacatccctccattccctgctgcatggcgcacaatgcagtacaacattcatcaatccaaaaactttggttattcagggaaaaaaagaaagacaaaaaaggtaaaatccaccaatatttgatgcccccgtcattgccttccgccgccctcttttgtcccctgcacatagtgcaaggcaacatagcggattgcatatccgccgcctgcttttttacaggaagaaatcacatatccatatgaatatcaatagataaatatgaaaatagatttgttttttcttcttatctctgcaactttgaaaagttattgatgtttttatcttagaaaaatatgttgccaccggatatgcaatccgcaaaaaaatgttgtttatacggatatcgcgtaaaataaaaaacttatccaccaaagcggacctgatctgatggggtattttccagcttgcagtcctcaagggtccatgtgcggggaggcagcaccttgttatctttaatcagaatattggcgcaccttctgaattggaaaggtttctgcccccatcccttaaactcgtcattgtaaatgaccttattattgatgaacttgaggttgtccgtggaaatggcgaacagcagcggcacatcgaacgtcttgaaaacattattttctatcagcacattgcgatgatagtaatccctctgcttgtccagctgcttgacttccgggtaaatggaaatgatggcattcgtaaactggtaacgcgaggtcaggttattaatgaatgtatttttgcggatcaccacttcatggcaggcgccactttcataccacccctgggcatcccctgccaatagaatggcggagccggaggaatggtcaaacaaattgccctccaccagcactctctccggcgttgtaaaaagagatcctctggctcggttgttgcggacaatattgttgcggaaaaccacggaagggtaaaaatccgcattctccacggcatccccggccctgacggaggaggggagcggctcttccaccgtaatcaccatctccgcggaattctttttcactgccgtcttcacggtggccgttctgccgggttccagcgtaggaccgttgatgaaacggattttttcaccgggaagaaacacctcaaaccccaccgcctgccgatgcatgtatttgcacttcagggtatggctgtccactacttccatcacgcccaggcaggtggaatgaacattgatggcatcatccatcatcccttcgaacagggctttctccaccacgattccgccccgggtattggaaaaatgggtcgcgtccgctccggcggtgtgtacgcgccccgtgcctttcctgaccatgactccgccgcctttcatacgaaagtcctccgatcgctggaccagcagggccatgcctgagctctggtgcagagatacgtcattcagtgatgttttccgagcccggtacaccacgcatcccggatgggggcggttataattccgaagaaccagcgtatcccccggcttgattcccttctgcctgaggttccaggacagacggagacggctcccgcccagcggctccacatgcccgttccagccgatgtccgatgtattggcgataatatgtcccgtccctttctcaaaggccatgcagcttcccattccttcttcccagcctttcccctggaaaacgaacctgttgttccggatttcgtaagggtaggcctttttgtctatttccacttccgtgaaccgatcatccgtcttcacgacgcgcgcctccgtgcaccaggaccgttcgtaatccacggataaacggttgatgctgacattttcgctgtccatcaccaggaggggaaccaccttgccgtgaaaaagaaacagggaaccattgccctccacgcggacattccgcaaatcggccagaggcacacacaccggatgaatcagcggctggtcatggttggaaatatggaaactcatgttcaaagccccctccggataaaaatggtaaatgcctctggggatgttcaaaacgcccccgccctgcctccggagagcggaaacggcagcccgcagcgccggcccctgatcttttctgacgccgggaaccatgccgaattcagaggcattcaccacagctcctttcatcccctgcccacttcctgtcgtcttccaggccagatctacccagtccgcatggtcgtaggaattattgtccacccggtcggccatcaggtaaagatgccgtatgccgttttccgccaccggaatggaaaacttcttcgcggccatccccctcctcatcacgccggaactccataaaacctcggacccgctcatcacgcggaattccacgcttccgtctccatccgcaccgtcatcaatgccgcatgcaccttccagcctcaaaactttcgggttttccggaacgggcaggggaatcatggacgtagcgtgcgtaccgattcccgtggcatattttttgccgcctatgctcaaccccgcattactgaaagaccggtccaaccgggtttcccccgtctcctggcgagtcatcagcaggctggaggcaggaacttttacggctatggttccggattgggcagcttcttcctcgccccgggactgtgccgggaataatcccgccaaacacgctgcaactacaaaactccatgaaaacatccggctgaacatattttttatactccgttcccgtattccttctatcagaaaaaatatggatcgtccagaagcttccatcagagaaaaagagagattgccttccataccgaattcagggacactgtctccatgcgatcagcattcttcctactgcccggcatcctgccggctctttccgcctgcgggcgcggaggcgccacgcttgaaacggataacgtccaggcggaatggttccccaacggcagcagaacggcgattgtcctggaaggggaaagcgaacccgtttccgaacgggaaatccggcatccccattccggcatgactcttttttaccattcgctgggggacggcagaggaactttggaaatcgcaggaggggttccggaaacggctacagtaacatactgccagggagcggcttccgcggagctgcatttcaaaacagcctcccgggaaatactcctgaatgacgtacgccgcccggacgcgaatgaaaaaacggccttcctgaatggctggagctgccaggaacggggcacagccctgctccgttccgggacagccggagccatgaccacggaaaaaaacgtcccatgaatcttctgagaatactgaaaacgggaacatggaaaatcccgtgcgcacttctgcttgccggggttctggctctggcatgcgtccagtgttccgtccgttccctggtgtacctgccgccccaacccaaggacaaaaccgcgtatctggaaaaacgtgccgcctgggaaccgcatcggcgcaccttccaccataatggggccaaactcagcggatggcttattgaaaaaaaggggcagcccctcctggtatattacggagggaacgccatggatatttccatgatgcttccctacctggaccgttttccccatgccaagctcctggtcaattaccgcgggtacgggctcagcaccggctctcctacggaacaggatatcatgggagactccctggctattcttgactccgtgctgaaggaaaccggaagaacgccggacgacgtcatcctggtcgggcaaagcctcggttccggagtcgctacccaggtagcctccgtcagacacgtgaaaaaactggtgctgctggtcccttttgacagccttctggaaactgcccgcggtctcttcccatacctgcccgtcaggcttctccttccggaccacttccggtcagacctggccgcgcccaaagtcgcctgccctgtcagcatcctggctgcgggagcggatgaagtcattcctccgcaccacgccaaacggctccgggactgtttctccgtaccggtcagttaccaggaattccccggagccatgcataataccatctggctcagccccggctttgataaagcgttttctcaaagcatcgggtactgatctccgttttattccgcaggagccagagacacgcggcgcaggcagcttccttcatgttccagcagcagccatgaggtttcttccggcagcgcttccggaaacaggttggcccattcgacaatgagcacagtctctccgtccagatactcttcccaccctatgccaatcagctcggactcatccttcagccggtaaaaatcaaaatggcatgccggcaggcgtccgtcagcatgctcatgcaccagggaaaatgtcgggctggcagccgcctcggaactccccagcccctccataatgccctgggtcaggtgcgtctttccggcccccagctcacccaccacgcccagaatttcgccgggcattaaaattttacctatttgcctccccagctccctcatttcctccggggaatgagtcaaaacggggccgtttctaaaaattttatgccattcgctcatttttccatgaaattttgcttgtctaaaataaagtcatatggtttattgcggctcccgcatttgcgggcgaaccttaacagtgatagcaatggcatacgcaattttcaaaacaggtggcaagcagtaccgcgtccagacgggcgacgtgatcgacgttgaatgcatcaataccctcgaagagggggccgaagcaagcttcgatcaggtgcttatggtggaaaatgacggaaaagtgaccgtcggcacccccatggtggaaggagctacggtctccgccaaggtggtcagccagttccgcggcaaaaagatcatcgctttcaaatttaagcgccgcaagggcttccacaagaaaaaaggttcccgccgcgccatgacgaagctggaaatcactgctatcaacgcctaatttcaacccttaatttttattatcttatggctcacaagaaaggtcaaggttctgtcaagaacggtcgcgactcccgcagcaagcgcctcggcgttaaaaaattcggcggacaggaagtgatcgcgggcaacatcatcatccgccagcgcggcaccaagtggcaccccggcaagggcgtaggcatgggtcgtgactacaccatcttctccctggtggacggccgcgtgttctttgaccgcgaaggccgccgcgtcaatgtggctccggaaggatctgaagccgccaactaaaatacggattactctatctccctgcaggggcggccatccacagggatgaccgcccctttttctgtccttctccgcgctccaataaataacaggaattgttcttgcaaaacaattgcccctcccccactatccacgcagagcatgaaaaataagatatgaatcccaaaacagattccaagcaggccgtccgcaccgcctctaccctgccggtcatttccgggttgaggcttaccaagcaaaggcaggaagtctatcaggttcttctggaacaaagggatcatccaacagccaatgaagtttaccagcgggtacgcaaaaaactccccagcatctccctggccaccgtttataactgcctggaggcgctggtgaaccacggcctggtcaatcaggtcaactttgaacgcagttcttcccgtttctgtcccaatctcgttgagcacggacacttccaggacacccggaccggacgcatttacgacatcaccatcaaggaaggcgtggacctgaaggaattcattaacttgcccgacgacgtgtgcgtggaagaagcccaaatcaccctgaggggttccatcaccacgccgcagggctaactctctttcatcattatgagtctggtcattaaaaatttgcacgccaacgtgcaaggcacggaaatacttaaaggcatcaatctggaaattcccaagggagaggtgcatgcgatcatggggcccaacggctccggaaaaagcactttatccaaagttctttgcggacatccggactatgaggtaacggagggggaagcgtggctggacggacaaaacctgctggacatgagcattgacgaacgcagcagggcgggactcttcctggcattccagtaccccatggaagttcccggcgtttccaacgccaactttcttcgtgcggccatgcaggcccgcatgccccatggggaggaactggatgcggtcaccttctacaaaacgctctatgcaaaaatggaccagctcggcatggcccgcaaattcacgtcacgcgccgttaacgaaggtttctccgggggagagaaaaagcgcaatgaagtgctgcaaatgcttctcctggatcccctctatgccattctggacgaaacggattccggcctggacatagatgccctccgcattgtctcggaaggagtcaactccatgcgttcccctttccggagcttcctggtcatcacccactacaaacgcctgctggactacatcaggccggatgtggtccacgtgctggctgacgggcggattgtccggaccggaggcggagaactggtggacgaactggaaagcaggggatacgagttcctgaaagaagcggaaacagcggaaaaggcataacgccgccaatccggcaatcaatcatgagcgatacacctgacatgtcagagaacgggaacacacagaacctgtttgacttcgaccggagcaaggggaacttctccttcccggaacgccataaatttgatgccggatacggcctgacggaggccactattgattacatctgcgacgtcaaggacgacccggaatgggtgcgccagttccgcaaaaacgcgcttgccgtttttgaaagcaagcccatgcccacccactgggcttctccggatattaaaaaaatagacttctcccaaatccgctactacctctccgacggagaacggcccaaacgaagctgggacgacgtgccggaggatgtaaagcgcaccttcgaacgcctgggcgttccggaacaggaacgccaatttctggcgggcgtggaagcccagtacgactccgaatccgcctactccaacatgaaggaggaactccgcagccagggcgtcatcttcgtcaactccacggaaggcctgaaacaccatgaagatgtcttccgcccctggtttggaaaagtcattcccacgggagacaacaaattctctgctctgaacagcgcagtattttccggaggttccttcatttacgtacccaaaggggttaaactcaaacatcctctccaggcgtatttccgaatcaactcggaaaatttcgggcagttcgaacgaactctcatcattgcggatgaaggtgcggaactcatgtacatggaaggatgcacggcaccccagtttgaaacttccaccctccactccgccgttgtggaactggtcgcgctcaagggcgcgaaaattcagtacgtcaccgtgcaaaactggtcctccaatgtcttcaacatggtcaccaagcgcggccttgccatggaagatgcggaaatccgctggatagactgcaacattggttccggcctcaccatgaaatacccggctgtggtgctcaaaggcaggcgcgcgcgcggggaagtcatctccatcgctctggcaaacacgggccagcatcaagatacgggagccaaaatgatccatgcggcggacgacactacgtccaacatcgtttccaaatccatcagcatcggcgaagggcgcgccagctaccggggccaggtaatcatgggcaaagggcttaaggggtgcaggaacaacacggaatgcgacgctctacttctgacagccaacagccgtacggacacctaccctgccatcacggtaaaaggggatggaggcacggtgcagcatgaggcatccgtctcccaggtctctgaagaaatgcttttttacatgcagcagcggggcatcccgaaagctgcggcgatgtctctggccgtcaatggattcattaacgacctcgttcaggaattccccatggaatactctgtggagctgcgcaggctcattgatctggaaatggaagacagcatcggataaggagggaaataatgaaccacttgtttaacgaagaacaattttccgcaggctttcttcccgcatggtttgaagcccggcgccgccatgccctggaacaggcggaacggcttccggaaccttcccgccgcatggaatcctggcgtttcggcacccccggaaacgaatccctggaacatgttgaagcggcccttcctgtggcgccggaagccttgtcccccatcatcagggaacatgcctccatgccggaggccctccgcattgtttacgccaacgggctccccgtgtccatcccggaagagcttccggaagggctttccgtaatggatatggaagactttgtgctccaatgcccggataccgcccggaaatatttggaaacagagacggaaacgctcggttccgagaaattgtcggcattgactacggctctccagcacaacgggctggttattatggcggacagggaaatctctccccctctggaaatactccacttcatttccggagataacgtggccgtttttccctctacgctgctcattgcggaaaccggaagccgcctgcacattctggaacgccaccttagcgcagaccatggccgccaattctgcggagcgctccagcagtaccacctttcctccgcgtcatctgtcaaatacgcgctggttcaggaacttaacagccgttcccgtgccgtggagctttcccatattatggcggatgattccgcggaaatggaacatctcgtcagccatcccggcgcagcctgggccaggcaggagacggtctgcatcctgaacggagacggcgcaggagtccgcctgctttccgccaaccatctgaaggaaaacaaggagctggaccagaggacctgccagaagcacctttaccgcggagcctccagcaacctgctttatgccaatgtgcttgacgatgaagccagcagcattttcagcggcatgatcctggtggcggaaggcgcgcatgacaccagcgcctatcaaagcaaccgcaatctcattctcagccccagagcggaagccaactccattcccggcctggaaatcctggcggacagagtgcagtgttcgcacggttccgccacttcctccatttccccggaagaaattttctacctgctttcacggggcattccggaacagacggcgcgcagaatgattgcccagggctttctgaaacatgtcttggaccaattcggcgatgaaaccatacgtaccgcggtagaaagcatcatcctgccctgaccgctatttcatgaaacccaaaaagacggagagacggacccctatccctccttttccgtcctgatattaacgcgccgctgcaagagagccgccacaagcagaaacagagcagttccccccatcatgctgtaataccattcacggtaaggcgtatggtactgcaggaggatttccgtctgctgttccgaatccggaacagaaacaagaatagaatagcgctcagtactggataaaggaagctcttcccccttcccggtgcgggcgctccatcccctggaatagctctcaagaacagacaattcctttgttcctggcggcacagtgacatggatcttattattcgttctccaatccggaacaacaggagaaaaatgattcttttccccctgggttcggacaaaatagcgtccacggtacaagggattttccagcaagaagaaatcttccgtttcctgaaccagattccacccgtcaaaagacggccttccggctttggcatcacacaacaaatgagaaatgccggccatggcataatctttcggataataatgtccatccgacaaaggtctcagatatctgggctgcaccgtttcataacctgaggccagccttattccatatgtggataaatgattagtacataaaaaatccaagtcattatgaggattgacgataacaacggcaccatcccccacatgtccgcgaaactcggacatccattccggttctttataaagatagccgctttccggtttgtcggaataggcaatccatgaagaagaaaacactatttgttccccaaaggtacataataccacaagtcctgcccaccacttcggataacggctggatatattcaggcgggaacaggcccagccccctacgctgaccagtaaaatcaataaggcattgcgccaatcccaaatcatcagctggtccaggagacgctcgcttctgagcaaataccaggaatgacggtatttttgctgagaagtcgttatgtttccgtcaataaagctatgtaattttaacagcaatggttcatggaaacactgaactgccaccgatacggcaagccatatacacaaaattccaattccccaccatgcaagtctgcgccagataggaagaaccggatgccgcctaaggtcaaataactgccatccggcaagccagctcattccaaaagccatcacaaccgtggagcgtgaatagaggaaagtggaaagaggtgtgcatgaaacaattaaactgacaagaaaacaaaacttggcggtcaacggtgcccggcggttaaacaatgccagaacagccagcacaaaaacaactcctccaccaaatttgatatcgaataaatcagcgccaatcactttggaaatactgattgtctgaggaatgccgaagagcgtcggcatcacagatgtggccagaaaaggaatattttccagcccccagacaaacggcaagcttttacagccttccatgcgcggcagggtgtccacaaaaacatccaaggaaagcaacgccgccaaaaatccggagatcaaataaaaagatgatgatttcagaaaaactttccaggaccagcggtctgcccgtttccaccaatccgcaagaaacacgcacagcaccaaaagaaaaacaaagagacacgcttgcaaatggcctcctctgaatccgagagcaataaagagaatagagggaagatgcacccatttgtttttccttctcccttccaacagggaccagacaatcaacggcgcccagattattccaccaagccaccggtcatatatccacataataaactgggaataaaaactgaaactcacagctcccagcaatacgtacggaatgggaattcccctggatttcagtagaatgatcatccccagccctgcgataaaaaactgcagcaagattcccgcatcccatgccgtccagaaaggaagaaaaccaaataaccaatgatgccaatcccccgggcttaacatggtattttccggcagtgaagtcccattgtgagtataagggttccatcccatatacccatcactttgccaggactgctgcatcgcccagctataaggtaaatattgagaagccccatctacgttatattggttatggacttcctccattggctgagttgcgaatggtttgaacaggcattccacacaatccaccggggctaaaacctttcctccaaacacggcaggagcaaaaaaaagcagtacaagtactgcccaaattattatcccccaccacaagggaatttttctattttttttacaattcatttataataaaaatctgacattggctcctcatgcatccccaaagaaaattcctgtaaattaacgaatgaatttctccacagaattgttaaaaccggcatccatcgttctccttcagccctgaaattaaaccaatgaatcggaacgcctttttctagcggatttacaatccgttacggacagtaaaagaaaaaaactcttgttctcagggaaagtgccgctctttatacggttattgaaacgtgactccgcttcaacatgcaacgaactctataaaagagggtttgccaaaattctacttcaggcccggatatcgtagcaatttcccgtattcccgtcaccagggtgagcccaggcaaatttctgtgctacgtaagaggccctgatacgtaaagaaacgacgttgcaagttcttttctcttagagttacagcttgactccggattgtaaatccgcccaccttctcaagaaagcactatttcattgaaaaatgcttcacccagaattattttcatcctgaattcccagttaagcatcttaagaaaaacatcaaaaaatctggccggaatgatatgaaatagccttgcagccggtttatgacctgtccgacaagcaaattgctgccacaaatatttatgattcatcattccatataaaaatataaataaaaaggaaccggacaaacaggaacggcgcgaataaataaataatccgaaataaaaggaatccgaaaggctcaccctgtgagcatctcatccggcatccggtaaggaaaacgaaactattttttgaaacaaggaagagtgtttctccgttattattaccgtatggtcacattttacaatatcactctctctaccgccttttccctgctgatgctgtccgtggcggaagcggcacggcccaatgtggttctcatcaatgcggatgaccttggctgggcggaagtgggctgctacggccagaaaaaaattaaaaccccgaacattgacaagctggcctccgaaggacagcgatgggtttatttctattccggagctccggtttgttccccttcccgcaatgtgctgatgacgggcaagcatacgggcaactgcgacgtacaggatttgaaacgcgtggacgcgggcgaaaactggcgcgacctcaaaggagactggcccatcagaacggaaacctacactctaccggaagccatgaaaaaagccggttacgccacagcggtgttcggtaaatggggtattggggatttcggttccaccggagcgccggacaaacacggcgtggacaggttctatggctacacggaccagaaagcctgccacacctactatcctccatacctctggaatgacggaaagaaggaagttctcaacacttccctgacagccgccactatcggacacggttcccagcccaaaggggaagttctggcggacacctaccgcgcggaacaacacagttccgatcttattgcggataaaatgctggaatttgtgaaggaaaaggcccatggcaaacaaccgtttttcctgtattacgccccgctggaaccccatgtggccatgcagcctcttcaggaatggattgaccgctatccccgcgaatgggacaaatccccctaccgcggcaaccggggctatctgccccatccccgcccccgggccgcctatgcaggcatgatttcccagatggaccacaacgtaggacgcctgctggacacgctgaaagcctgtggcctggacaaaaataccatcgtcatttttaccagcgacaacggcaccacgcatgatgcagggggggtggaccaccggttcttcaactccgtagccgatctcaaaggtttgaaagggcagctttatgaaggcggtatacgtgtccccggcattatccgctggcctgggaaaatagccccgggaaaaaccatcacccagccggccttccatgcggacgtgatgcctacactgtgcgctctgacaggagcggatgcaggttctccgctgggaacggacctctcccctgtccttctgggcaaaaaatccgctctgcatgacaggaagcccctggtctgggcagggggaggctacggcggccaggtagccgtgcgtttcgactctaagaaagtcatccgccgcaacctgtttcccggtaaaaaaccggacaactgggaagtgtacgatatcgtgaaagaccccgcagagaaaaataatatcgccgcagaaaaccgtgaccttatcaacagagccatcgccattctggacagggaatatcaacccgcgcccggcttccaggccctgcgttacaaggccccggaacaggtagccgaataagagaacgggaaagaaggttccacgatccgcctccttcgccattctgaccttgacgtgaacggagccggggttagtctttcacgcatgagtttgacatcatccctcctttccagggtgctcggaggcggttcctgctccagagaagaattgatagccctcagccgggaaccgctggaagaattgtgccaggcggccaacgccatccgggaacatttttgcgggaatgtcttcgacctctgcaccatcatcaacggccgcagcggcaaatgttcggaaaactgcaaatactgcgcccagtccgcccattactccacggcagtggaggaatatccccttttaagtgatgaagccctcctggcgggggccaggtacaatgacgcacgtggcattctgcgctactccatcgtcacctccggcaagaggctgacggatgaagacgtggaccggctctgcgccagttaccggcacatcgccgaacattgcggcatctccctctgcgcctcccacggccttatttccaagaaacactgcgagcaattgaaagccgcaggcgtttcacgctaccacaataatctggaaacttcccgccgcaatttccctaatgtctgcaccacccatacgtacgacgacaaactgcaaaccatcaaatgggctctggaagccgggctggaagtttgcagcggcggcattatggggcttggagagactatggaagaccggatagacatgtacatggacatcgcggcgctgggcatcaaatccatgcccgtcaactttctgacccccatccccggaacgccgtacgcggacatgacccccctgggagaggaagaacagctgcgcatcgtggccctggtgcggttcatcatgccggacggcttcgtccgcatcgccgccggcaggaataccatgaaggaccacggcaggaaaatcttcatgtccggagcgaatgccgccatctccggagatatgcttaccaccgccggcgtcaccatccgggaagacctggccatgctggcggaactgggatatgaagtccgcatgaaataaggtccgtcccattttcgcgccctttgccatgaatcactccgactggtcaaaaaaagatctggaatacatctggcatccctgttcccagatgaaggattacgaaacgctgcctcctatcgtggtcgaccacggaaaaggcgtcaacctgtatgatgtggacgggaaacgctatctggatgtggtcagctcctggtggtgcaacctgctgggccattcccaccccaaaatcaaccgtgccatcaaggaacagcttgattccctggagcatgtcatcttcgccaacttctcacacaggccggctatcactctgtgtgaagaactgatgaagaaaattccgcgggggctctgcaaattcaatttctcggataacggttcggcatccatcgaatccgccatgaaaatgagtttccaataccactaccagaccggaaaccgtcagaaagtacgtttcatgtccctgagcgacgcctaccacggagaaaccctgggagccctctccgcaggaggcctggacctttattcggaactctacaaacctcttctgctggacatcgtgcgcattcccgctccggattgctaccgctgccccaaggggaacaaacgcggctgctgccaggcggaatgcattgacgcggcacaggaggcctttgcgcgccatggggacgaatgcgccgccctgctggtggaacccctgctccagggctccgcaggcatgcggatgtatcctcccgcttatctggcgaaactgcgttccctgtgcgacgcctacaacgtgcacctcattgcggatgaaatcgccaccggttttggccgcacggggagcatgttcgcctgcgaccaggccggtgtttccccggacatcatgtgcgtctccaaagggctcacgggcggctatatgcccatgtccatcaccatcaccacgcagaaaatttacgatgccttttatgcggactacagggaaggaaaagcattcatgcacagccatacctattccggcaatccgctggggtgctccgcagctctcgccgtgctgaaggtcctggacgaggaacacattattccccgggcgcaggaaaaggcccctcttttccgccagatgatcgtggaggccctgggggatcatccccacgtgggggaaatacgcagcctgggcctggtgaacgccattgaactggtggagaacagggaaaccaaaaaaagctttccgtccgagcagaggctggggtaccggatttacagggaagcccttaaacagggacttctgcttcgccccctgggcgacgtcctgtatttcaatccccccctcgtcatttctccggaggaaatggaggaagccgtatccatctgcgcttcctgcatccgcaaagtgctgggataaacgttcatccggcacaacaagacgaaccgttcttttttgaagaaaagatgcaacttttcttcgggacaggggtttgtaaggataccttgcaatctcataccgccatgatacgcctcaccccgctccgcaaacgtccggcgctttccgcgctggtgcttctcctcctgggatccggcttctgccaggctcaggaaatgcttaccgattccgcaagaaaggaagcttccgaatggcttaaggaagtcaaagccggctacctgaacaccagctcttcccgcatccagaaggccgtggccgcccttaccgcggccaccagcacggaaaacgccgccatgaaactttacgtggatgccatgaaggaccggtttctgaaccccaccagcatgatgtcccgcatgctgaaccggggaggcgggggcggcttccgcatgatgcgcatgccgggttccggagggaggggaggcaacagcagcaagcctgacagccccagcaccgccttttccaactggcgcaagcagaatacgggaaacaacgtagctcccggctttaaaaaagcccttcaaatccagtgcaaatggatgctgctttgcctgagaaaagcggacgcggaaaaaaacgaacgtgaccttaacgtttcctccagcgtcctgtccatgctggatgaagtggccgccaacgccaaggatgtaggcgaacagcttcccatggtaagcggagccagcgaagtcatccgcacctacctgaacattggagactaccgttcggaaaccctgccggacaacctgatggatctcaataccatcttcgaccgcgtactgctggctccctacaaggagaaaaaggatgtggaaaacttccggaaactctggaacaaacgcatcggcctggaagcgactctgctgcaaaacaactccgccagcgataaaaaaacagcggaagcagaaaaagccgatttcctggttaaaagacagtgggaacgggaaaaggcctgctttgaactcggcgaccaggtagcggcacttgaaaagatgaaaagcctgatttccggcatcaaggacccttctgaaaagcagcgtgccatccgcgacctggaattcctgcttcttaccccggcggaacaggcgaaactccgcgaagagcgcatgaacaaacgcatgccgggcggcccgcgcttttaacaatcgtcgccaagccccagcctccctcctttcatcccccgttgcgtaacgcgcatcgggggattttacattgcggagagccgcatttccctgacggaggcagcttccttcctgccgggttggaaccatgtcttgcgcaggcggtaaacgcgcacgccctggatattctcatccagatgccaggctgtgcgaacgccgtgctgctcccagatatggcggctgagcatccccatgaacttgctgtccatatcggaaacgtcaccttgcggagtgagacagacaatgtacacattatccctgcacaggttcagggaggactgaccctcccaccccatctccttcagtttccgctgtacgggtttcaacggaaaattccagccgcccagcgtgacaacgttcttccgggaacagctccaggccttgcggaaaacagactgccccggggccagatcgtcaatagtgccgccggacatctggacgcaaaacagggaatcgggctcccggtccacccgctcgcataacaggcgcccggcatccggggaaaaagactccagattagcctcccacacggcggcgcacgcctgggacaaagaaacggagaacgcgcagaacatgggcacgccgcccgcaagagctcccttccccgtccaggtgatgcggatgggacgatatttatccgaccacagcagacacagccctgcaatcaggaacgttggataaactacacggaaatacaggcggtctatgctggccatatacagcagaatcagcaccagcagggagcctacgcagcacacgagggccggagaatccccgcgccggaaagaaacgcggcatgccagaccgaacaaaatccagcaggggagaagatccataacggaatcccatgaaaacagatgcaaggctttctctccacgggcccacgccctgggccagaattcacctccgtcccgcgccagcagaagcctttccagataatccgtattgaatacatccatatcgcaattggtaaacatccggaccatcctgatatcgttggcgaacacgccgtacttttcacactggtaggcgctctcctgcctgatgggacacgtgtccgagagaagggcgcgggcctggttccatgccgccacgtcacatccctccagcacattccggtgggcgtatttattatattcattcaggctgaaggacgcaatgagcacacaggccagagccagccagagacgactgagggcaaacagcttttccctggacggcctgagcccttccaggctgcctgccagcaggatggccccccagaaagcatcgcacaccagggcggcatccagccggaccatgctgcccagcacgcacaggaatactcccgcgcaccaccccctccaggaagagccgtacttcaaacacgccagcacacctgtaaatcccgtcagaaaggcggcatggctgaattgcagagcggcgtaaaagcccggcatgatcagaagccacaccagcagcagaaccagcgtattgaaatcatatctgcgcgccttgcgggcatgcgccgtcagcatcgtgaaaatggccgcgccgctggacaacgtggcaagcgccagaaacacaggccagacggacaccccgccaaggacaggcgcagctttcaacagaagcccggtcaacaggggattgacgaaaatgacatgggcgtccgcataagagggatccccccatccgtcaagcacggacgcaatcaccagatcgtcattggactggtacgccacgcccacaaggctccaggccagaaccagaagcaacaggttgaaccatacgggatggagcagaggaaaaagcgatacccatctccaaatctgtttcaacataagcaaattccctgactttacagactgttttccctgtccggggacgcatactaggaacggggaaaatgaaagtcaagagccgatccggatgaacaaaccggaggggctaaaaggctgcaacctcttccttaacggttcaggcagacgataatgcccgcgataatcatcgcgttgccgcccactttgcgcatggtgatcggttttccgaaaaaaatccggtcaaacaaaaggatatatacatatgcggagcattccagcatgttcaccgtaatcatcggcaggtgggacaggcagtaaaacgtcagcaggcagcagcccaaaaaaacggaatatgccgccatcgtggccggattcacgaaataggcaaggccggtcagccggtcattcatggcagactttttcaaaaccacctgtgtgcaggaagcaagaaaaacggaaaacaggttcagcccaatataaaattcctcactcatgcgcctcctccgtggaaaccaaaataatacccccgataaccagcgccgctcctgccgccagcgtccaggaaagagcctcccccaggcaaagccatgccagcaggataccccagatgacaacggcggaacggttggcataagctacacccaggttgaattttttcagcatgacctgccatcccgccgcataaatgcccaacaggaacagcacgccggccagcagggcaaaccggcgccagtccgtccagccgtagggggcagccatgcgccccagcacggtattcagcgcgtaaacgataaacagcaggtgcagaatcaggtagttgatcatgaaagaaaaaaagagacgggaataattcactcataccggcgcgccaccaccacggcgggcctgtgcttggtttccttataaatcttggaaatgtaaatgccgataacgcccaggctcatcagaatcaagcctccgaccagccagatggaggccacggaagaggcccagccgggaggggctacattatacagaagctggcgcacaaccacccaggcgacatacagcatggctaccagggtgaccgccaggccaaagtaggaaatatacaccaacggcctggcgctgtaggaaaccacggaattcaccgccagcgccatttttttgcggaaagtgtaggtcgttggagaagaggatgctttcttcaccctgcacggcacctgccggaaaccggcggaaacgcacagcccaaagaaaaaaggctcccggtcctggaatttcagcatctcccgcagaaaacgcgcgctcatcagccgcgccgtaaccatattcctggtaatctgctggtcggaaagcaaattaaacaatgtgtagaacaattctccggaaacggcttcaaacaagccgcccttcctcttctcctgcaccccgtacaccacatccgccccggtagaatccatctcacgggaaaaattaaccagccactcgggagattcctccaaatcactgtcaatcaagaatacgcgctctccccgggcttcttcgcaggccacgtacatggccagatgatggccgaagttgcgggataaatccaccacgcgcacccggccgtccttctcccgttccttcaacgcctgttccagaccgtcccttgggcagccgtcattcaccagcaccacctccgtgcaggaggggtcataacccgcctcaagcgcagcggcgaaactgcgggaacagaactccgccagataaccgcccgtacaatacacggtagccacaatggacaattgaacctgtggatcagtcataacgcttttacatacatgagaacgcgcttcctttccccgcttttctcgcacacctcgtccttttccggaacacgggcaaaacccatgcgctcatgaaaacgcacggaagccgcattgtcctccagaatccgggcatataaccgttccaggcccagctcccctgcggccagctccatcatcccggcatatgcggcggaagccgggcgcagttccctgaatgccctgtcgtaaagataaatgcctatctctccgcaacgcgtattccggtcaaaccagggcaggtaaaccagacccagcggaacctggtccgcataaatcacgcaggcgcgggcatcctccccgcggacgttcctttccagccacgcccggtgctgctcctccgttacctgatccaacaaaaaaaacggggtgatcttttcggaattgcgccacacgcgcaggcggctgcgcatggcctcatccacatcagacacgttgaccaggcaaattttcatcatgattcaactccctccagcccgaagccggcccgcaacacctcccggcagccttcttcccccaaatcgtaatacaaaggaagcctcagcaacgtatcgctggtacggtccgtatgaggcatggccccggcagaacgcccgaatctcatcccggcaggggaggaatggaggggaatgtagtggaacaccgctttaatcccgtgctccgccagcttgttgatcaagcgcgtgcgctcctccatggaacggagcagcacgtaatacatgtgggcgttatgcgtgcaatgctccggaatgcacggacgccgcagcaccccctgttcttccaatggagccagcgcgcggtggtacatattccaccacttcagcctttccccgttgatctcctgcccgtgttccagctgggcatacaaataagcggcggtcatctctccgggcagataggaggaacctacgtccacccaggtgtatttgtccacctgcccgcggaaaaacctggcacggttggtccctttttcccggataatctccgcgcgttccatcagggaggggtcattcaccagcagggctcctccctctccggaaatgacattcttggtctcgtggaaactgtaacagcccaaatggccgatggagccgagccgacgccctctgtagcaggagccgacgccctgggcagcgtcttcaatcacatacaggcgatgcctctcggcaatttccatgattgcatccatttcacaagccacgcccgcgtaatgaaccacgcaaatggcgcgggtgcggtccgtgatggccgcttctatcagcgtctcgtcaatattctgcgtatccggcctgatatccacgaatacaggaacgccgccgcgcagcacaaacgcgttcgccgtggagacgaacgtataggaaggcatgataatctcgtcgcccgggcggcagtcgatcaacagggccgccatctccagcgcggcggttccggaatgaaccagcagaacctttccggcgccggtgcgttccgcaagcagttcatggcattttttcgtgtaatagccgtctccgcataaatgggcgcgctggatggcgtcccggatataatccaattcgggaccgtgctggtgaggttggttgaaaggaatctccatggcttcagaaaagaccggcccatgacggacgcccggcgcgggcatgccgatcccgtgcggaaggcgttccccgccttccgcacggggagaccctactatgaacggagggctgaaaacaagcctagaccttgatgaaggtccggtttttgtacatgtaatacaacacgccccaaatcagggcgtaattgcacaggtaaaagacaaacctgtccgcatccccgaagcactcgctaaacccggcaaacaatacccgggagaaattgcccgtaggggggcacagagatacccatatgtacacgaaaatggcattgctcccgattacggagaaaaagaatgtcaaccagttcaatttcagcacatccgtcagcagatagaacagggccagcagaaaatagcaccatcccgccgcccacaataccatggaactggtgaacaaacgcttgatcatcggaaaatccaggctccaggcatatcccagcgccaggcagcccgcgcccgcacataacagccacgccagctttttcccgtgcccctgcacccgcttcagaatctggccgcccagcagaccgagcatggtcatggcgccaaaaccgaactgcgccagaatccacgcataattcgttccatcctgccagtttcccatcaggtatttatccagcagcagggccagattcctccccggttcaagcattcctgccgcacaggaacccaccgcggggtcagaaaaggaaacaaacttcatgaccagccagtacacagccagcagcccccccgttgccgctacctgccaccggatggacagatgaagaaggcaaatggccgcaatcaggtagccggaggcgatggcctggagcgtattgcagtacagggacatcctggacggttcaaaactcagcagattgccctgcaccaccatgcccagcaaaaaaagcaccgctacccgcctggcaaccttcaggtaaatcttccacaagggttccgagccgatgcgtttggaaaaggaaaacggcatggccgttcccacaatgaacaaaaagaggggcatcaccagatcccaggcggcgaatccctcccaagccacgtgcgtgctgtgcttcaccagccactcggggctccggtcgtaaaaaagattgatgccggccacaaccagagccaggcccccggtcaggaaaaacatgtcaaatccccgcagggcgtcaatggccgcaattctctgcggcctggtatcggaaagtgaactcatggcaacattccaactacggcaccacgtccgccaacctttccaaagactttctttttctaaggctccgcaaagaaaaacggctgtttccggaaaaacctgtccttcacggcaactccgtcatgatgcctttctccatattccctgccccgcatttcatgctatgctgcccctgcaacatgaccatggggaacgaccaatccggcgaacgcgacagcttccggaatattgaaacttacgctcgcatgaaaatggatgaacttggtctggcagactggcaattcggctgggaccgggccaaaagaaggctgggagtgtgccgtctgctggaaaaaagcattacgatttccattcacttcgtccgcgccaacctggagacccctcatgaaatccgtgacacgattctgcatgaaatcgcccacgccctggcgtggacccgccacggagaacgcacccacggaccgcgatggaaacaaatttgcagagaaataggggctgtcccgtgtgcctccgccaaaccggacgccatccgcgtcaccacgtacaaatatctcctgcgtctgaaaacgacgggagaaatcgtcggcaaataccaccgccgcccctctttcgccaaatacctcaagcgcatggccctgaaaggccgccccgatacgctgggccagctggagctggcgccttatgaagaataatctccacaaaagctgaaaaaacgagtcgtttccggctattctccagcatcaacgatcatcccattccgggcatttccattttttacatctgctcattatccggaacagcagaggaaacactcaaggtgcgctggcgtacgtaatcgtacaccttcgggtcgctgtctccggctgcccagaccacccgcaggaagtcggcgggatgaatatttccgtgatcccggaagaaacggcggtcattctcacagcagtaaatgatgtcatcccccatggaaccgacgagcttggcccgcgccttggcaatcaggcgcggaaggtaggggagaccgcagagttcgtcgccgaaccccggcaaatcatacccgatcacaggtttcccctggtaaaactgcccgtgctggacggtcaggaagaagtcccggcgcgccgcagccatcagcagaaccgtggtgggggaaggttctcccgtacgggcataggtttctacaaaatcaaacaattcccgagtgcggcagccgatggaagaaagaaagataatttcctgatccgtaaagaagccgtccacattcctgtggccttcatggtagcgccccaccgcttcgcggaaaaggtcgtaaaacgtatcgttccaatcttcttccatcatcggcccggcgatttatgtttgcgcttgaagttaagcatcatgatctgcttggtcagattggcttcaaagcgggcctgttcctcgcgggacatttccgaacgcgtcttgagcacctcctgcgcttcctgaatggcccgttccacgctgccttcatcaatctgggaggaattaagcgcgaggtcggttaccatgagaacatggtcgtcattgacctgcacaaagccggtgcccaccaccatgctttcctccgggccgtccatgggcttgtagcggagttcccctggttctagggaggtaatcagggccgtatggtgttccagcacgcccatctccccgagactgccgggcagataaacgtattctacagtagcggcaaccgccacttcatccggggtaatgactttgaactccatgctcatggttcgggacggcgggaaaagggttatttggcttccttgaggacgtcatcaatgccgccgcgcatgaagaaggcgtcctccggaaccatgtccagcttgccttccaggatttccttgaagccccggacggtttccgccacgggaacataggcaccgggaatgctggaaaagacttccgccacatggaacggctgggtcaggaagcgctgaatcttgcgggcgcggctcacgatgagcttgtcttcttccgaaagttcgtccatgcccagaatggcaatcatatcctgaaggtccttgtagcgctgcagcaccatctgcacgccacgcgccacttcataatgctcattccccacaatttccggggccagggccttggaagtggaagacagcggttccaccgccgggaagagcccctgggccgccagagagcgttccagcaccaccgtggagtccaggtgggcgaaggttgtggccggggccgggtccgtcaagtcgtccgcaggaacatacacggcctgcatggaggtgatggagccgtgcttggtggaggtgatgcgttcctgaagatccgccatttcctccgccaggttcggctggtaacccacggcggacggcgtgcggcccagcagggcggacacttccgaccccgcctgggagaaacggaaaatattgtcaatgaacagcagcacgtccttatgctcctcgtcacggaagtattccgccatcgtcagggcggacagggctacgcgcagacgggcaccggggggttcattcatctgtccgtacaccagcgccaccttggattcttccggtttctccaagttgatgactccggattctatcatctcattgtacaggtcgttcccctcacgggtgcgttcccccaccccggcaaaaacggagaggccgctgcgcgccttggcaatgttgttgatcaactccatgatgagcacggtcttgcctacccccgcacccccaaaggcaccgattttgccgcctttcaggaaggggcagataaggtcaattaccttgatgcccgtttccagcacttccgtgctggtggattgttcgtccaacggcggagcgccgcggtggatgctcttcataccggcgcaggagagtccgccgcgctcgtccacagcttcccccagcacattgaaaatacgtcccagcacgcactgtcccacaggaacttcaatagggcgccccgtgtcgcgcaccggcatcccccgccgcagaccgtccgtagaactcatggccacggcgcggacccagccgtctccgatgtgctgctggacttccagaaccagggtcttgcgcttgccgtcaacttcatagtccacttccagcgcattgagcagggcggggagcgtttctgcctgggagaagtccgcatcgaccacagcgccgatgatctgaacgagaatgcctgtgttattcatcatgggaaaaacttggtgttgaaatggagaggaaagaatgttctgtttgaaaggcgggtaaagaaagcggaaccatgttattccatagcgcgcatggccgtggtaatttccagaagttcgttggtgatttgcgtctggcgcgccttgttgtagtccagggtgaggccgccgatgatgtttttggcgttttccgtggctcccttcatggcgaccatgcgggcggagtgttcggatgcccgggcctccagcacaatctgaaccagtccgtggaaaacgtaaagaggcaggatggtatccagcagagcagcggggctgggttccagcaggaattgcttatgggcatctgctccgtccagggaagagcctccggctttcgccatgttcatcaggggttccggctcaatgggaagaagctggcgaaagacaggcttctggaccattgtgttcacaaaaccggagaaagccacgaaaacgcgcccatattcctccgccttgaacttttgcacgatgaaatcaaataccggctttagttccagcagggacaggggatccgtcaggctccaggtggcctccaaccgttcattcaatttggcgagcgcagcattcagcttgcggccgatggtgatgtaatgggcgttttccggggcctgttcccggaccattttgatcaggttggcgttcagcccgccgcaaaggccgcgatccgtattcaccagcagcaccagatccgcgccgccgtgggtttgcatcagagggctgttgctggtgtcaatttcatcctggagatggtagagcacttccgccagggcgcggatataggggcgtcccttgacggcctggtcctgggcgcggcgcattttggcggaagccaccatctgcatcgccctggtgatctgggacgtgtttttgacggacttgatccggcgtctgatgtctctcagattgcccatgtgtcagtactcccgtaatcgttagttccagctgagcttgaaggattcgatagcggctttaagccctgcgtctatttccggcgtcaggtctttttccttcagaatgctttccagcagatccggatgctgatcctgcatcaccgcttcccacgcattctggcattccttgatcctgtccaccggaacgtcgtcaaagtaccctttttgcatggcatacaagtcagcggcctccagacccagggatttgggctcatactggttctgcttaaagagctccacgatgcgctggccgcgggccagcttagccttcgtgctgggatccagatcagacccgaactgggcgaacgcctgcaattccgtaaattgggccagatccagcttaatggagccggccagcttcttgataattttcgtctgggcggaggaacccacgcgggagacggaaatacccacgttgatggctgggcgcaccccctggtaaaacaggtccgtttccaggaatatctggccgtccgtgatggaaatgacgttcgtgggaatgtaggcggaaacgtcgcctgcctgcgtttcaataatgggaagagccgtcagggaaccgccgccgtgttccttgttgatgcgcgcggcgcgttccagcaggcggctgtgcaggtagaatacgtcccccgggtacgcctcgcggccggaggggcggcgcagaatcagggaaatctggcggtaggccacggcatgtttggaaaggtcgtcataaacgataagggcgtcttcccccttgtccataaagtattcccccatcgcacagccggcgtagggcgccaggtacagcatggcggcaggatcggaggcggaagccgccacgacgatggaatatttcatggctcccgtttcctccagtttcgccaccaggcggctgatgttggcgcgcttctggccgatagccacgtaaatattgtagagaggctggtgatcaggaagcttgccttcctccgccagacggttctgttccgcctgggcaatcatggtatccatggcaatggcggtcttcccggtggcacggtccccgatgatgagttcgcgctggccgcggccgatgggaatcatggcgtcaatgggaaggatgcccgtctggacgggcacggaaacggattggcgggagatgatgccggaggcgattttttccaccgggtaatacgcttccgcctcaatcggccctttgccgtcaataggttctcccagcgtgttcaccacccggcccagcagggagcggcccacgggcacggaaagaaggcgtccggaacacttgaccagatccccttccttcaacttggaatcatcccccagaatcacggcgccaacctcatgttcttccaggttcatcgccagccccatcaccccgccggggaactctatcatttcattgagcatgacgccgctcagcccttcgatcttggcgacgccgtcccccacggaacgaatgacgcccacgttttcctgactgacggaagccgtggctttttttatttctgcttcgagttcttgaagtatgttgctcatgggaaaaattcgttggttaattggaaagggtgcgggccatcgcagccaggcggtcgattctggaacgcacggaaccgtccttcacgtcgtcccctacctggatgcggacacccgccagcagagacggttccacctcccagcggtagtagagggcgccgccatatctggcctccagtttggcctgaatcagggaacgttcctcttccgtgaggggcacggcactttgaatagtggctgtacggcttttcaccgcatattccaccatgccggaaaaagccttcagcagagcggcataattgcggggcttgcgttccgcaattttccgggcgatcagacgcacgcggtcctccgccacggcattcccgtccatacagagccggaacagcctgcgggcggcattttgcgtgtcctttccgatcttcataaatatttcaggaatccaggctgtcgatcgcttcccggttgattctccgctggtcttcttccgtcagcatttttccggtaacctgggccgccgccagggccaccagctggccaaattgttcttttaacgcttcacgctctttctgctgttccagttccgcaagctggcgggccttttttatgatttcctcaaccttccgggaggcttccgcttcctgttcttccaacaggcgggcggcggcagccttggcggcgtctattttttcctgtcccttttcccctgcttccaccagcatttcatgcgtctgttcctttacggaagccagctgccgctcactttcctcacgcatttcctctccttcttcaatacgctggcgccttttttccagaacattctggatgggtttgaacgccagataacgcaggatcaccaccatcagaatgaaagcgatcaggttggcaacaaaaggttcccaactcgttaccccaaagggagcaaaaggattccaggcttggtcagctatgagattcagcataagatgagcggtttgaacatgccggaaattttccgaaaccggcagggaacgggcgcaccgccccggagcggagaagctccctccgggggcgaaacttccgttttatttcacaaagatggagatcagggccacgccttcaatcagggccgccagcgtgatggcaatcaccataatgggggaggaagctccagggttgcgtccggtggcttccgcggctttcgcaccaatgaggccaatgccgaggccggcgccgatggtgacgaggccgaaacctacgttgccggacagttcggccagggaggtcattgcgataggatcaatcatgttattggtatggtttatgttttttgttgaacgttcccccacaggttgcccatggcccggaacggaaagctggcggtacggtttatgaggtttttccaggcggcaggcggtccggcacgggaagttccttctcctcatttttggaagcatggccgtgggcgttatcgtcccccacctgaagtttcaggaaaatcgccgtcagaagcaggaaaaccagggcctggatgaaccccaccagcagttcgatcgccagaaacggcagtacgcacagggagctgagcacgggcccgaacatatgggccatggtgtcaataatcgtttccccggcgtaaatattgccgtaaagacgagcggccagcgcaatggggcgaatcgtgatgctcaggacatccaccagtcccacaaaaatgaagatgaacaccagcacgaatcccatgaaccccggcagtctccccttggggccgaacaggtgaataaagaagcctttcagcccctgctcccggatagaccagtaaagccacatcagcgcataaaaaatacccaggaacatcgtcacgttcatgtccgcattcgcgccgcggaacagcggcaccccatgataggtgatggttcccaccccgggaagaagccccatgtaattgctgaccagaataatggtgaaaatagttccgaagtaccagaagtacttgcgcgtcaggcgcggccccagaagggactggacaaagttgtacagagtttcaaaaaagtattccaccgcattctgtaaacgggaaggcaggatgcgcatagagcgggtggcggaccatacgaccacccctatcaaaagaaccgccagaaaaagcatcagcatcgagttggacaccgggagctcaatgcctccgggcagaggtatggaaaacaaatggggagcggcctgttccaatccgtgctccgctccttcctccgccgcacaggcgctgccgcccataacgccggacacggtcaatgccgccaaccacaggaactggaaaaatctgctcattgtctgtcttttaccattactcgtgccaactcctgtaaatactggaaaaaggaatccattccctttatttgacggttttgattgtggactctcctctttattttggcaagcccaaaactcggcacgcacacaaattatatacatttgtacataatcttgaaagaaatctggatgcccgttacaacgttaacaaaatcttttctccatcaacaaaaaagcttccgggaatccatcccggaagcctgcaggcagaactgaagggccgttacttggcggcggaaataatatggatgtggtacacgtctctgccgtccgcggccttgcgccccgtggcatgaattcccgtaacatcggaagtgattacatcgagggtttccacagcattccgaagctccctgctgctttccgccgcgctcttcagggcgtcacggaccggaaccaggttaagctgaaattcgagagggactccctgtgccggagatttcacggattccctgaggacttccataccgaaggccttcggcatactgaccgcccagcgggtatcggaaatgcttaccaccgggttcagatcggcgcccaaaggacactggtaatcgtaggtagtgatatccccgtccacagaagactggggcgcgggcaactccgccattttaccctggctggccagagtgacgacggttttggcggcattagccactttctgccaggcttctcccagggcggcgcggtttttcacttcatatgcagcggagaaacgcggcaccggcacattcttgagcatgggactgggagcgccctgcatgtccataatgaacacgcctgaacccgtaaggccggaaagagcagttttataagccttccagagctcctcaatggtaggcctggccatctggatcataggggcggccatgcgcacctgatcgctcacatcatgcttcggattggaaatataggcattgccgtagtcccatacaatctgggcaatattaccgcacagggaacaacccatatccatcatctgcggattgaccgtgcaggaggaatacagcaccgtggacgcgccaggacgcacggcactcatggcggaaggagcgtccaacttgtagaattccagcggatatgtgcatgcttccacatgcaccccctgatcctgccacgagaagtaggaaacggccgtggcattccgggccagcttttcatacatgccaagcatgctggccttgatggaatccagcgccgtcatggaaggagccagatcggcaattttccaatcggcgcctatcgtctgcatcacatccttcaacccggtgagcatgcccttgtaataggccaaatccatgttaataacccctttgacggaagctttgtctgcgaacagcagcccataagccggatactggaaccgtgcatccgccatggagaaatcaggacgggacagcatggattcctggggagaagaggcgatacggacctgtttttcaggattggtggttataaagcctaccagggtatcacccacaaaagagacggccacatacagcctggattcatccagacgaacgagcgccgccttaagacggtccatattttcccgggaaatctccatccggtctttcgcctcatccagcatttcttccagcttcgcacgcacttttttgcagtccacttccgctaccttgcaggccaggccattgtaggtcttttcatacagggaaaccattccatgcagctccatatcctcctggagattggcgtccttcaggaaagctttggcctgggcctgggcttccggcgtcagtttggcggcaatcatcacaggcgccgtcgcagcctgggaagggcgtaaatccatcagctcagcccactgcacaatcatctcggccccctggccgcccatgacctccgcccccgcaccatcggcatcctcatttccatcctttaccccctggaaaagcttgtaaacggacaaaatttccttcatctggttcaggcccatcttggtaaaagaggactgcgcgctatccagccacggagcccattcgggacccaagccgatcatcgcgtcaatgacagggctgctgaaagaacatttccgctgcacgggttcggaagcgtcttcccccggaatggctatggattcatcagcatcctccccggaggagcaggaactccaggttttcaccatgttcaaattctgaacgctcttcatgatgccgggaatatcgtaaacacccgccatcatccccatgtccttgggaaagagggcggctattccgagccgttcggcacgcttcgccaccaggtcgggagccacggaagccaaaggatcaagagaggcggcgggagtcaagccggctgcatcctgcccggccttggcggaagatgattgatgatcgtcagagcaggcggcaagagcgcaggtcagcacaaaacagggtatggagtagaaataatgctttttcattatctttaaacatggggtcatgatgccatccggcaagcgcgctgcttccttgcggcaacagcccctatcggcgcatctttctcattatacaggcgtttccccgcacgacgcaagcacaatgcaaaacattaacgcactcagggcgtgcatgacgttgctgcgtggaaaaccttttaagcgccgccagccatccccgtatccgccagattttcctttttcccccgccaatattttccgggaaaaagccgttccggaaaccgcaaaaactctccggctttctctaagaaccggattaaagaggttccgccatgggaatatcatcctccggcaggggagactgcggcgcaggagtgtttacggaagtggaacggttgagatggcggggaatctgctggggcagtccggggatgtaatcggaatcaccccggcgcggcgtgaggggggccgcagaaggctcctccgacaacggaggcgccgacgacccggcaggccttgaggagccgcccaccggggttgccttgatttcagcatcggaagagtcatccagatcggcagggatttcatcagccttgatcggctccatcccttccggatcatacaagccgggcggcaggttgtccggcacgacggcaggcgccccgctccgttcccgaagagcggccgcggccgtttccggggtctcctccaccggttccgccaccgggatgtcatctttgggcgggtcaataatagccttgatgtcttttttctccgtttcgaaaaattcctttacgatgggagcggcggcagcccccccgcccagccgttcgtgggcgcggccttcatacagcaccacataggcaaagcgcggattgtcgcagggcatgaaaccggcgaaccacgccagacgcttgtcttcccgttccggcccccattgggccgttccggatttgccggcgatactggcataagacaggcgcgcacgcccccccgtaccggcttcaaccacttccctcatccccttgcgcacgctggacagagcacgctcataggcaggcagaggacgttgaacttcctggggcttgggcgcgtaaacgacattggcgttgccgtcctgaatctgcttgatgagctggagcctgggcagatagccgtttgccacgccggacatcatgtgcgccacctggaggggcgtaaccagtagcgtcccctggccgatggacaaattggcggcatccccggacatgaaatcgcgcttgtaattgcggatcatataatcactggtcggcaccaggccgggatcgtccggaatgggcaggccggtccgttcccccaggccgaaggcgcgggccgtatccatcagggcttccgcacccagcttcaggcccatctggtacatgaacggattgttggacatcgccagggcgcggacacagttgatatcccccaggggagtcttgctccagtttttgaacacgtggttgccgatcgtcacggaagccgggcagtaaacgagcgtattttccgtgattttgttgttcctcaaggcactggctaccgtcaggactttaaatgtggaagcggggggataacggccctggaaagcacgggcgcccagaggaccggcaggatcattgcgcaaagcatcgtaatctttctgggatatgtttggaatgaacatgttcgggtcataggacggcgtggacgccatcaccagaacttcacccgtcacgcagtccagcaccaccatggcgccgcgcctcttgccgcgggaaaggatgcgttccgcatccttctgccatttcaggttgagggtggtgacgacagccccgccgggcttggggcgtatttgcagttcatccagaattttattgccgtcttcgtcaaacatcaagcgccatacgccgggcgttccggtcagatttttgttgaattccttttccagccccgcacggccttccacctgctcccacagcggatccatgtggttgatggggccggttggcagttttcccttggaccccacatagccgatgatatggccggcgatttccttctccggataggaacggatgtaaatgggcagcagctggaggccgcgcacacttttcaccttatccttcagcttttccgcttcctccgcacgaatgacgttcgtgagcggaagaggcagccagcggcggtgctcataatgtttccagagctgttcgtcggaaaaagaccacgcctttccggcaatttttttggcctgttccaaacagttgcgcccgaattccaccacgcgggaacggtcggggttttcaaaaatttcaaaccgcaaagccagctggtaggctacggaagtcacggccagcggttccccgttgcggtccaggatggggccgcgcggagcgggaatcagcagagccatggtcctggcggaaggccgcgtgctggtgtgcgcttcccgcgcagcgtccagccgacctccgccaagggaaggaatcagggacagggaatccaagccattctgctccttttccgtttccctgggcatctccggagcggcggccacgccttcccgttcgccggaagccgtgtcggaatccttctttttgtcccccaggtcaaccgtttccacggcgtcatcctctccgcgctgttccaccgcagcccggccagcggccgctcccccccgggaagacgggctgcgcgtggaagcctggccccaggccgtatccgccgtccacgcggccaaaccggccaacaataccagggaacgtatcagaacctttattttcatcagcttgcaggattgtggcaaatataccgcaaggaatcaacgattattcacgctcacgcttattcctgaacgatgacggttgttcccaggccgcatttgtcaaacagaatgcggcatgcctccaccggaacccggatgcacccgtgggaattggcgtcccggaacacggtgcccacatgcagccctatcccgccgtgaatgcgcatccaaagaggcattttggcgccgatgaatttaccgccgggaggcacgcgggaagaagaggtagcatccgaattcacgcacaaaccgcttgcatcaaacacgctgccgtaagaccgggaacggtaatccgcatctttttggatgatggaaaacttgccgcgcggcgtttcatgggcggatttgcccgtgcaaacgggaaagttcatagccggcttgccatcaaccaacaacacgccgcgctgatccttcagatgaatgacgattttgctgttccgcgtccccgcctggcggatacgctcgtcatgataccagatatcgcgcgtgaagcggtactggggatccgcaacaaaagcttcataggaagaagcatatctgccgtccttcatcaacggctttccatgaggcgtcctgggcgtggaggaacaggcagccagcagcagggaaacacacaggaaaagaagaaacgggagagcggcgtgcggcatgcggcctgctttaccctcttcccccgtggaaatcaagcacgattcccctccgttccggcatgtttggagtaatcctgataaagacgcccgtttatgcccgtatctgtttccgttctttctctctgccgtcatgaatgccgcttcttccgttcccacccgttctccccgcctgcactccctggacgccctgcgcgggctggacatgctcattatcctggggctggacgccctgattctgcttctggcttccagaaatccggaaaacggcttcctgcaagaagccgcgcgccagatgacccatgcccgttgggaaggattacacctgtacgatctggtatttcccgtctttgtattcatatcgggcgcctccatgtccttctccctggcgaaatacaccggcacctccatcgcccccggactcttccatctctggaaacgggctttcggcctggcttttctgggccttctggtcaacggaacgcttacctggacggaaagcatgcgttacgcctccgttctgggactgatcggtttttcctgcgctattgcaggaacctgcatcctgctgtgccgccggacgggggcggttgcctcagcagcgggattcatcctggtcctcattaccctgcttcagttcacctgcggcaattttacgccggacggctccgtcaactcatgggtggacaggcactggctccccggccgtctgcatgggggagtttttgacccggaaggcccgctctgcgtcgtttccgcctccgccctgtgcatgggaggatggatagcgggaaagtttttgaaagaaagccggctcccccccgtgcgcctctgcacggcaatggcaggagcgggccttctccttttctgcaccgccaggatgctggacggcacctaccccatcattaaaagcatgtggacagggaccttcgtcctggccgccgccggcatttccctgacgtttctttccctgtttcatctggccgttgatgtgtggaacgaagggaaatgggcccaatgggcatttcccctccgcgttatcggcataaacgccctggccgcctacctcatccactccctgctcaatgtgcatgaacttaaccgtcgcatcttcagcggcatggcagacctcttccccccgttccagcccgtcttccttgccgtgtcccttctgctgctgcaatggctggccttgctcttccttgacaggcggcgactgcctttcatcaaaaaagcggtcaaatgaccaggcggcggataccccggccatggttgccggtgctccccgaaaaaacggatactcccctgtgaaacggccagccaacattatctctttcccccaaagccctaaaaggagaaataaagcggaaacatcattttttgctcgtttcagggaaaagctctgccaccctttccggaaagaggccaagcacgttccttccatgattgtcttccggttcccctgccccatttcctaaccccatgatcattccatgaaagcattcatgttcccagcccttgttctggcggccctgaacatatggactggcgccgcccagccccggacaaccgccattttacctgtaccgggcgaaaaggcgtgccggcttccgcttcctccctaccaggccttttgctggttttcagcggaccgcggccgctggcccggagacggcaaccgggttctgccctggttcggaaggacggcccccggcaacctgctggacagcaagccgaatcccagcaccgccaaaccgggggaccatgccatgttcgccctgttccacctcaaagacggcaatttcatggccgtgctccccgtcgccgcccctgattccctcgcgtggctgaaacttgaaagggacggaacattccttgtggaagccggttcgctgggaacctcccccgccaaaccgcaggccgtcctggccgtcaccgccacggacaaggatatttaccgcgcctgttccgccgtatgggacaaggccctttccctccctttcatcaagggcagaaccttgccccgggaaaagaaaatttatccggaaccgttcaagtacctcggctggtgcagctgggaacagtataaaaagaacatttcctccaagctgcttgaagaaacggccagaaaactggaggcatcccccgtccccgtccggtggatgctggtggacgacggattccagacccaggaaaggcttcagctggtcagtttccagccccggcaggatcaattcccccggggctgacagcccctgatgaaacacaaaagccccaaattgaaatggatgggcctgtggcactgctattacggcctctggaacggcatccaccccaggcaccgtctggatgacgagactgcccgcggtctggtccgtaccgccaaagggaaaatcctccccggtgacggctccggaggagccggagcgttttatacccccttcctgcaatccgtcaaagacgccggattcgacttcgtgaaaattgatgtgcaggcggaatacctgaagcatgcggacgggctggacaacccggtccgccacaataccaagtgctcggaagccctggaacaggcctgcctgaaaacagggctcagcctggtcaactgcatggcacagggtaccgtcaacattcagaacacgcgttacagcgcggtcacccggtgcagcattgactacaagctgggagatgaagccatggccaaatcccacatcctccagtcctacgccaataccctctggctgggacagaccgtgtggccggaccatgacatgttccattccacggatcccgcctgcgcccgcctcatggccgtatccaaagccgtctcaggcggccctgtctatctttcagacccggcagacaaacttaatccggaaaacatcatgcctctcgtctggtcggacggtcttctgctgcgcccgctggctcccgccgtgcccctgcctgattccgtctttccggatgctctgaacgagaaccgcctgtaccgggtaatcgcccctttacccggtcaaagcgccgccgtggtggtgtacaacctcaaacatccttccccggcggaaccggtacgggggaaaatttccctagaggattataaaaacgcggcggctctgctgaatggcaatgcggcggaagcctacgcctctctcccggcggagggcatcgccgcctattccgcagagggaggccgcgcgctgactccggcacagccggatctggatgtagagctgacgggattcaaggaccgcctgttcatcatggcccctatcgtccaaggctgggccgtcatcggaaggagggacaaatttctctctccctgcgccctggtttccgctccggggtacagggagaacggcctccgcttccgcgtgaaggaatccgggcctgtcgtcatctggcggggaaaaggcccggtcaaagcgggaaacacccccgtcaggaatctggggaacgggttttatgaattgcaatttcccgtctccgaccaccccttggacatcactgtaacagcggaataactccggacatttcctctcatttttcctactttgtctcccatgaacccgcttcatcccctccttgctttctctctgttgcttccgctctgccggcattccatggcttccgacgcagctccgactgccattcccgcgccgaagcccgaggccccaaggcaggcaattgaacaattcctggggcttaccgccatctggatgctggaaatggaatggacccacgcctatgccaataaaacgcccaaggcggaggatttccggaatgccatgctggcggcgggccttcagcaatgccccgcggactttcaggaagcatggctgcggcaaacggccaggccgggccgcaattacgcggctcccgtcctgcgcaagtacggcgtcaggctgaaagacctcagggaaaggctccagggcaaactgttcaaaatcaaccctcgggtgcatccgcccattcccctttacgacgaagatgaacaaattccacgcatggatccgcgcacatgcggagaccccaaggctatcctggaagccctggccgccctgcgcgcccagatcatgggcctcaccccgggccagctggcccgggccagacagtccattgaacgggttatgctggaattcacgctggcgtacatggaaaccgccatctgcatggatactgcgggcatccgggaaagccaggtcagggaactgttcgcctccatcagaacagaaggatgcccggaagacttccggcgcgcctggcagcacgacctgcctttctttctcaaaggccgcttcacgggaccggaactgactctctccgccgtctgtaaaaaatacggagccgacgagcaggaactctttctcaaggtgcgacggaaaatgaaggaatgggatatccagccgcctacgccgcagacgcaggacgccttccgccgggacatgcgggaaatccgggaaaacatgctgggaggcagataggaaacagcctttttgcatgcaacgccttccgggaaccttcccggatatcaggccaaggtcaccccagcagcccggtgtccattccttcgttatattcccaaattccctgctccaccataaacgcgctccagctattgagcagttgttcaaaatagacggcattcacattgaaatggtaaaatgtgtggtccgccacgtccagaagttcaaatcgggaacggttcttcttttttctccacagctccgccagcctctcgctgttgcgccacggcagaagcctgtcccttcctccatgactcgcaaacaggggaggcagccccctctgcacgcgccgcagggggttgacggcatccctctggtccggaggcatcatgccgcccagcttaaaagcggattgcgccgtcaggtcgcacacgcctcggaacagggccacggcggcggggccgggaggaaggggagcctttttgcggaacagggaccagcgggcgggatgatccggaagggccacatgcagagccatcagccctccggcatcacttcccgccacagtaatgcgggccgggtccagccccagcagagcggcgttcccatgcagccaggcccaggcttccctgccctcttccagaatgtccatcggctccacttcataatcgccgcgtgtgcggaacatgggtataatgcctgcaataccctgctgggcaagatggagcgcccacggcacaaaatcccccaggctcttgcccacccacatgccgccgtggaaaaagagcacggaaggagcggcggcttccgcccggtgaccggggggaaaaaagacatacgccatcagctcctctccgtctgaaaaccgcctccacacaaagccgggctgttcccgcaacagtttcctgtaccgggcttccgccaaatgatcggcttccgtgaacaattccataagaacggcttcatgatgcaattgtgttgcactccgcgcaagtttgatgtctaaataatcgtgtaatgactttccgttccattttctccctggcctgctgcgccgcagcccttctttctcccgcttccgcagccccccgccccggagacgccaaactgagagacgacctggacgtggcttacaatacatggcgtctgcatctgctgcgcggcaattatgacggctggagagccacaacctccgcctaccgccaggtgaaagtgcgcaatctggccgtctcggaaaaacgcccctttcccgcctccctgttccggcagcccatggcacctcctgcgctcgctccgctgatgtacgtaggttccgtcgtaaacggccccacggccgcagccacctactacggcaaggtggatctggggctgggccaggaacccacggattcgaacgccctggtgctgctgttcacccatgaaaacggcaaatggaaatatgaccaggcgcgctttttcaacctcacccgcctgcccgccgtcaaagaacgcctcaaacgcggagacgcctccgtgctgatggagcaggacgggttccagccccttgggaaaattcccgccgtgccgcctgtctgcccgccacccaaatacatcgcaaaaattctggtggactgccccggccgcaccgtccaggcgaacgtcaacaatatttccctgcatgaatttgacaacacccgcctggcggaagtcatttccggaggactgagggacgggaccaactcactcacactgaacttttccgacagcccgaacggcaaaaaaggcgccgtactcgtggaagtgtacatcatgccggaaatcccgggccacctgcccgccagggctttttcctacttcgtccccccccaggcgcaacccaaaagcggccctgtgctgattaacgtcactccggaattgctgaagaccatggagcctaagaattcttccccgaaggcagccgccggcaaataaaatcgtcattcttcaacgtttccgttgcgggcccggtcataccgccatatgacaactcaacctcaagtcagcagctccgcggtatccggcaactcatggtggatgggaatccttggcgtcatcgagctatttcttggcttcatcgccctggcctctccctggatcgtcggagccagcttcatttgggtaatcggcatcatgctgatggttctggccgtcgtccggctgatccaggtcttcaccgtcccttcctcccgtgggtggaacctggtgacggccatcctgtacggcatcgccggctggtttctgttccgggaccccaatatttccctggctatcaccacgctcatcatcgggtggggcctggttattgccgccgtatttcagggagccatctggcttcaaacccgttccctgcctgccagcgggtggcggctgttcaacgtgatcatcacgctgatcctgggcctcatggtcatcttcggctggcctgaatccacggcctggttcgtaggtactctgatcgcagtggaactgatcttctccgggtggacgctgctcctgtatgcattcagcggcaattccgcccgccgttaatcccagtgacaacaatgaccctcacccaggaagaaaccgaacggtacgccaggcatctttcccttccggaactgggagaacagggccaatacaaactcaaacgggcgcatgtcgccctgacgggcctcggggggcttggctccccggcggccctttatcttgctgccgcaggcgtggggcgcctgaccctgattgacccggacgaggtgtgtctttccaacctccagcggcaaatcctgcatgccacggatgcggcgggcacggctaaaaccgccagcgccgccagacgcctgtacgccctgaacccctccgtacgcatcaacacggtccacaggcgccttacgccggaaaatgccgtttccctgctggaagggtgcgacctggttctggacgcttcagacaattacgcggcacgcttcgccatggcggatgccgcctgcaccctgcgcattccgctggtgtacggcgccgtgaagggctttatcgggcaggtggccgttttcgccccccatcagggaaccgcctgttaccgctgcctcttcccggcagatacgcccatgcaggaaaaagacaccgcctccgccgcaggcattctgggtgcgcatgcgggcatcatcggctgcatccaggccatggaagccctgaaatatcttgcgggcattccctctccgctggtgggcgccatgctctctgcggacacgcggcgcatgcgcttcaccaccatccctctggcgcctaatcccgcgtgcagatgccggactaacaaggggtgcggagccgcaatgaaaaattgacggcgacggcggcatctggcatcatttccggcaggtatgaatcatttaacacgcgccaaatccgtttttgaaatggagattgaagagctgcgcggcgtcctgtcccggctggacgacaatttcaacaaggctgtggacctcatgtcccaggctctggaccgcggcaacaagatcgtcattgtaggcgtaggcaaatccggcaacatcggggccaagatcgtcgctaccctgaactctacgggaacgcccaccgttttgctggattccctgaacgccctgcacggggatctgggcatcgtccaggacggggacgtctgcattgccatgtctttctccggagaaacttcggagctgctgaccctgctccccttcatcaagcgttttgaactgcccatcatttccatgacgggcaacacgggctcatccctggccaaatactcggatatcgttctggacacaggcgtttcccgggaagcctgcccgctgaacctggcccctacttccagcaccacggccatgctcgtcatgggagacgccctcgccatggccctggtggaagcgcgccacttcaccgcgcgggatttcgccaaacgccaccccggcggttcgctggggcgtgccctgctcacccgggtgagcgatatcatgcgccgtggagaagaaatggccatgcttccggaaaccgcctccgtgaacgactgcctgaaggcgatgaccacagcccacgccggcgcctgcgtcctgctgacggaggaccgcaagctggccggcatcttcacccacggagactttgtccgggcatacggggcgaaccctctcatcggagaacagcccgtcagcgggttcatgacccgcaatcccatttatgtcatggaagacgacctggccgctgaagcggcgaaagccgtgagtaaccgccatattgacgatctggtggtgctcaacgcggaaatggcccccgtgggcatcattgacctccaggaccttgccaggctgaaactggtttaaaccctccctttcccattctttccaagcatccgtgattcaaaagtaacaaatcaatcacggatgcctttttcattgaacggaagcttccgtttccacaatcttgttttcataaacatgttcctgaaatttaccaccgccctgcttgcctgcacctggggcttttcctgcgcacaggacatctccggcccggaggaagataccaatgcccccgctgcggaggaagccacgcgggaagtccctcttccggacgggaaaacggttcccaaatttgaacccctggatgagcaccgcatcaaaatcggcaatgtgattgtcaaccataaggagcgcaccgtcagttttcaggctcaagtcaacatgaaggaaggaattctggaatacgtctgctgcatgcccaacggcaagctgcatgaatccctgctggtgacggaggcggatcccctgcacatcagcctgggaatgacgctgctcaaattccaccgctttgaaaaattcttcccggtgcgggatgaaaattttgaatggcttcccttcacggaacccaagccggaggactacgcagactcctacgtgcagattgtcatgacctatacggaaaacggcagggaacagaagagcgatttttccgatatcgtcgtgaactcacaaacgcggaagggactgaatcccagcgactggctttacaccaattccttcttttacgaaggcgcctaccaggccagcctgagcggagaagtaatctccatcttcgccagccgcacctcccccatcaattacatcggagacttccatgacggcgtcaacgatacaggctggatcgtcaacccccaaaaaaacctgcctctgggcacaaacgtcactgtcaccatttcccagaaaccggttcaacccaagcaatagcatcctatgttcaaatccgtactttcactaacgctggccgccgcactgggcacagcctccttcgggcagaccaccctgacggccattcccggagaagcggcagccgccaaatacgcctccattagccaggaaattctgcgtgccattgaaaaagggaacgaatacctgaaaagcaaacaaaatccggaaggttactgggcccagccgtcctaccctgccctgacagccctggcggtcaccgcctacatgcgggaccccgccaaccaggggaaacccgtcccggaatacatccggaaggggtatgacttcatcctgaaatcccagaaggaagacggctccattttcaaccgcggcatgtcctcctacaatactgccgtgtgcatgatggccctgctggccgccaacaaggaggaatatgcccccgccattctcaagggccgcgcctacctcatcaagcagcaaaaccactttgccccggacaacccttataacggaggcatcggctatggagacaagcaggctcctcccattgcagacctctccaatacctccctggcgctggaatccatttactactcccagaaactcgccaaagacggcaagtacggtgaacagccggatctggactggaacgccgccacggaattcatcaaccgttgccagcaaaaccctgccgtaaacaaggaaccctgggtttccaatgacaaatcccagctcggcggcttcgtgtaccgtcccggcgtctccagcgccagggacaaaaaaagcgccgcctttgacaaagcggagccccccaaagcttacggcagcatgacgtatgcgggcatgcagtcccttatttacgccaatgtggataaaaacgacccccgcgtcaagctggccctcaagtggctggaaaacagctacagcctggacgaaaaccccggcatgggcgtccaggggctttactactactatcaggctatgtccaaggcactcagcgccatgggaatagataccctgacgctggaaaacggccgcaaggtggactggcgggatgaactggccaacaagctcatttccatccagaagagcgacggttcctgggtgaacaccaacaaccgctggtgggaggcggaccccgtcctagtgacctcctactgcgtgctggcgctggaacagctctaccactccattccccggtaacggactgccatgctgatttcccgggccggaaggggaggcaatgacctccttttccggccttttccgtacccggaaatgaacgccccatgaaatagaagggtcttttcttcaatcacttcaaattcatggacaccattgattccattaccattattgcagcggcatggggcctgctggttctccggctgacgctggcttttatcctgtggccgcacgggacccagaaagtgctgggctggttcgggggcgcgggctgggagggcacctaccgggccttcacggaaaaaatgggcatcccccccttcctggccaaggtggccatgctgacggaatttttcgcccctatctgcctggtactgggcgtattcaccagaatagcggctctcagcgttatcatcctcatggccgtagccatgaccaaacacgtcaaaaacggctacttctccaactggtccggcaaaaaagccggggaaggcgtagaattccacctgctttatgcgggctccgctttcgccctgttcctgacaggccccggcccttggtccgtggacgcctggtgcatgaacatcgtgcatgtcatctttggttgacggcggcagacagcacacggaagggcatagaacatactttccgattctcaaacccgccgtattctggtatttatggaaaggctttcttttgcctcgttaaccctttccgtcatgaccagccataaacgcttaaaactccggcagtgcaccaactgcgaatgcgtcattaacggagtatgggaatgggtggaagaatgcgcccgcggcgcagcggcggaagaacccgccatgcgcggtattctggatgacgtctgcctgtcccgcaattccctggccacttccatctcggcgcggctggcccgcaagctctcccgccgtgacatgccgcgggagctgattgagccccttatccgggaagcattgacggaagaccagaacatcctcagccaaatcgcccaggacctgatcgccatcgtggaccgggatcccgcctgccgtacgccgctggaacccctgcttttttacaagggattccacgccatcaccacgtaccgcatctcccactggctgtggcagcatgaccggacaatcatggcccttcagttccagagcctggccagtgaagtatttgcggtggacatccatccggcggccaccatcggctgcggcatcctgctggaccacgccaccagtttcgtggtaggggaaaccgccatcatccgggacaacgtctccatcctgcatgaagtcacgctgggcggcacgggcaaggaagaaggggaccgccatcccatcgtggaatccggagttcttatcggagcgggggctaaaatactggggcgcgtcaccattggcgcctgcgccaaaatcgcagccagctccgtcgttctggaaaatgtccccccccataccacggtagcgggcgtacccgccgttatcgtcaacgattccattccggacaatcccgcgctggacatgaaccagtgcctttgcgactgaaccggcaacagattgggaagccatcacttacggcagaaaacaggttgaatccgcagctccgccaaaatcagcggaaaaggcaagccttaaaaagaccggacttgatacaatagtttcaaccccaacgcgcctgtatttataaatcctgattttcaataattgaagcaaacccgaatcctgattggccaatctgacgggccgcgcctgttcaggcacggctttcccccggaatccgggacggctccttcagctgcccgtttccttcaataacatacttgtaggaagtcagttcgcgcagagccatgggaccccgggcatgaaacttgtccgtgccgatgcctatctccgccccgaagccgaattcctccccgtcgctgaaccgcgtggagcaattatggtaaacgcaggcgctgtccacccggttcataaaataatcgcgtgcccgtttatcctccgtaatgatggaatcactgtggtgggacccgtagcggttaatgtgttccacggcatcccggacgccgtccaccaccttgacggacaaaatgaggtcttcatattccgtggaccaatccctttcttccgccggaacggcctcctgaccaaaaaacgggcggctccgttcacacacgcggcattccacgccacgcatgcgcatgcgttccgccgccataggcaaaaaccgctctgccgcggcagtatccaccagcagagtttccgccgcgttgcaaacgccgggcctctgcgttttggcatcgtccagcacgttcacggccatctctaaatccgccgccgcatccacatacacatggcaaatgccgtccagatgtttcaacacgggaactttggagaactccgtcacggcgcggatcaaccctttccctcccctgggaataattacattcaagcaggaatccagctcgcacaactgccgcacctcatcccggctgccggaatccagaagccgcacggcatccgcaggaacagcggatttctccagcgcgctgcgaagagtctccgccagcacccggttggtccgcagggactcgctcccgccgcgcagaatgacggcattcccggacttcaggcacaaggcggcggcatcgcaggtgacggtccctcggctctcataaataaagccaatgacccccaggggaacgcgcacctggcggatacgcaggccgttggggcgtgtccattcccggatgcactctcccacggggtcgggaagggccgctacctgctctatgccgcaggccatgtgttctacccggtccggcgtcagcagaagcctgtccagaaacgcggaattccggccactcttccgggcctcttccatatcaaggacattctcccggataattttctctgcggcgttccgcactcctgcggccatcagccgcagggcctgagccttctcttccggctccagggcaagcatctcccgtgaagccgccagagcggcccgccccgccggttcaagaggattttccatcttcatgacttcctcctttcggcacaaaatacgttccggctccttcctcccttccctccagcagcagcgcaatgcgttccggatggcggccatgcagcatgtaaacgcccgttcccgcattcacggcttcccgtatggcctgcaatttagcgcccatgcctcccatggaaaagcggccccggtcctcctcagcgaatgccagtacggcatccacatcctccactcgggaaatgatggcctcccgccttcctccggggggatacaggccgtccacgctcgtcaggataaacagagcgtcggcctccaccaggcgggccatatgcacggacaggatatcgttgtccccaaacttcagctcctccacggatacggtatcattctcattgacaatcgggataatgcctccgtgctcaaacaggcgcaacaccgtggcctgcacgttgcggcggcggagtttcaaatcctccgccgtcagcaggagctgggccacatccacgttaaagtggttgaaaagattctcatatgcctgcatcagccgcgtctgccccacggccgcgcacgcctgtttcaaggacagttcctgaggataggacggaagacccaggacggacacgccggcccctacagcgccggagctgaccagaaccacctggtggccctgctgcatgagtcccgccaggacgctcaccaaatgcacaatggaagaaccgtccaatgtcccattctcacgggttaacacgcccgtacctactttaattacgattttcatgtatctccgccgttcatgatacaacaatccctttttccacagaaagcagaaaacgcgtcctttccgcgctaccccgtgaaagcgccggccgtaaaaaatggaaggaattcccccttcttcctccataaggataaaaaagataattccctccgcccgaccggctccggcgcggataaaatccgccatcccggccaatatctggacagccatgaaaaccaggggaggacaacaccggggaaaaggactggagcaggccgtgcgacatgtttccccccggctttattccctaaagctccatgcatgccggtgagcgtgccgcaaaaccgggaacggcatgcgcgacgcttccttcttcaatgcttttccccggtccggaactggtgccggagacgcattttaggcttccaatatgaagctgatccgctcatattgcccgggcatgaatcttgaccttctccaaaaagccgccaaccaggcgcggggactcgccatggatgccgttcacgactgtgcatccggccacctgggcctgccgctggggtgcgccgaaatcggggccgtcctgttcggcgatttgctcaacatctgcccttcgcagccccgctggctcaaccgtgaccgcttcattctttccgccggacacggctccatgtttctttacggctggctccacctgtcaggattcaacattggcattgaagatatcaagaatttccgccgcaaaggttccatcacgcccggccacccgggattccgggatacggagggtgtagaatgcaccacgggaccgttgggccagggcattgcgaacgccgtaggcttcgccctctccgccaggcgcgcggctgcccggttcaacaggcccggcatggatatcttcacccagcacgtcttctgcctcacgggagacggctgcctgcaggaaggcgtcgcccgggaatccctcgccctggccgccgtgctcaagctggataaccttattctcatttacgattccaacgacatcacgctggacgctcccgcggaacgtacccagctcacggatccgcgcgccgtatacgaagccctgggctgggatgtgcgccagattgacgggcacgacatcagggccattgagtctgcggttgaagccgccaaaaacgccaaaaacgggaaaccccagctcatcattgccaaaacggtcatcggcaagggcattcccggcattgaaggcaccacaaaaggccatggggaaggcggagccaagcttcaggaagaagcgcacgccaactggggaattcccgccggagaacgctattacgtctccgaagacgtccgtaccgctttcgcagacctgaaagcccaacgggaaaaagatttcaatgcctggaacgccatgtacgaacaatggcgccgggcttatccggaactggcagaggaactggacgcaggcatcaacgcctgctcctgcggcatcaatccggcagactcggacaaggcaataccgcccttcccgcaggactatggcgatgctacccgttcggccggagccgttgccatcaacgccatcgctaaagcgaatccctgcttcctgaccaccagcgcagacctttacagctccaataaaaactacctttccggcgcaggagacttctctgcggaaaccccggaagggcgcaacttctggttcggcatccgcgaacacgccatggccgccatctgcaacggcattgcctacgacggcctgttccgcgtaagcgccgccactttctgcgtcttcgtagactacatgcgcgcctccatccgtgtagccgccctcagcggactccccgtcacctatattctgacgcatgactccgtagccgtgggagaagacggccccacccaccagccggtggaaacaatttccggcctccgtgtcattccgaacctggatgtcatccgcccagcggacccggaagaaaccgcaggagcctggatggccgccatgcagcgtgccgacggccctaccgccctcatcctgacccgtcagaaagtggttacgctgaacggaatccccgttgaaacgcgccgggaaggcgtgctgaaaggcgcctacatcgcccggaaagaacagggagccttgaaagccattattcttgccagcggttccgaactggaactggctctgaaagcggcggaaaaaataggggaaggaatccgggtcgtctccatgccaagcttctgccgctttgacgcgcagcctgccgaataccgggaaagcgtgcttccctcctcctgcatgaggagagtttccgtagaagccggagtcacggacctctggtggaaatatctgggctgccagggggaagccgtgggcatcaaccgtttcggcttctccgctcccggaacacaggtgctggaagaactcggcatgaatgtggacaacgtcgttgccgccgtccacaaggttctggccaaataaacagggaatatttcccctcatctcctttcaggggctgttccgcatccgccgggacagcccctttttcatgcctccccggttgccaggaaaaaggcaaggccgttttcacgaaacaccagtatccgtaacgcaggaactatatcctttcctgtgaaaaattccgttcgtttcccgtccggatttctctaaatacaatacctccgcacatcagctccattgtctgaaccggacccggatgggactcaggccgcaaaagccccggttgcaagcagcccgttttcatctcagctgccggaacggataatttcaggtttccttcatggcgccgataaatatgcggggcggccatgatcaagcgccgcctctatcgacgatgcgatgaaccctaaacccgtaaaataacgagggtccggcccatcaacaatgaaaaaccgcccctttccgaaaaaaggggcgtttttaaagaccttggcaacaagggaagcggctcctttagaaagcggcttcaatcttcgtaatagtatacaccttttttttgtcgccgtccatcgggacaatcttcacctggtcacctacacttttgcccgtcagctccttgccgacctgggaaagataggaaacgatatgcttttccggatttgtgtcccacgcgcccagaatggtgtacaccacgggctccccgccattcaacggctgaagagtcaccttcgtgcccatggcggcgcgggaggtatccgtcacggcaaagtccgtgccgcgggccagggccagcgcatgttccagttccgcccggcggcggttgagcaccttctccacttccttggcatcctggtagccgccgttttcgcggagatccccctccgcacgggaaatcttcttgttatgcaggttttccggaattttcacgtttaccagttcttccagctccttcttgcgggcctccaggctttcccaggaaacgaaaatcggttccggtttgtcggagttgtccaccagggcgtccagcacaatggcgtgcaggtccgggaatacgctgatgatgcgggccatcagcgcgccgcggtcctgttcggagaaagcggaggtgttgtacagcatcttggcaaactggcggacttccgccacatcctgccccttgatcatttcctggatgatgctcttatcctccatgaacaggttcttcaggcgcagcatgcggttggggccgccgtccatgtggtcctgttcaatcagggaaagcatcgcaatgcccacagggaggccaaaaagaggcttggaagcgtcatgccgctggcggcatatccagatgagggactccgccggaagggtctggcgcagcaattcatgcttcaaatgcttgaccagcaccttgtcctgcccttcttctatcaggaatttggcgatttcccccacggcgcgggcgccgcctgcatcaaaaagctccagcgccttctgcggccaatcctccccaaagatggcgggcagcgtggcatacacgcgcttctgccgcacggcaggcatggaattgagcacttccgcgaagcggcccacatcgccgatattggcttccacgatggaacgaaggggataagcttccttggccgcctccgtatttttaagggaggcaatcaggtcatccctgagcacggccagctccagcacctgctggagagccaggctgccgccgttgcgcacatcagcatccacggcacgaatcagggcattgacggcatccggctctgccatgaccgcctccattttgatgccgtccagcacgcgcaccttggctttcaggtcggcagccttattgtaatcttccagggccgcctgcgcgcgggaaaggatattcgcgcgaagcgtgatgcgttcgcccttgcgggtgggcatcatgaactggacattggaacggagcatggcgcgcaccttgtcccaccagtttttccacttgtccgccgcaattacggtgcctttcagcgcggcttccagcttctccggagtaagggaattaccgtagccctgcaaggtaacgcgcaccagttccaccgggtcatccacggacaggttgatcagggattcggtatcttcataccgcttggccaagaaatggtcgtcactgatgaactccaaaattctgggagcgaattccagggcaacttcgtgttccggattttcctcaaaatcaatgaccagctttttggcggggagattccaggaaatgacttttccggcgccccaggaagcatggaagcagtaacgaccaggtgcgatgcgatcaagtttttcggcgagagagggggtaattttccccagagacaataatttctccaagtcggcgtgcatactaaagcatatgatacgcccccccctaccggtatcaagactaatttccctcttccgtccggaggcgtcccgaacggctttccaaagccgccacggagacagcggccgtccgcgtcatgctccgacttcacattcgggtttcgcttctttttccctcccctccttcatccagttgcggcttgaccgtgcggggcgtctggcgtaacatctccgcacgcattcaacccctgcgcaacacgtatcatggaacctatttacgaagggaaggccaaacgcctttatacgactgacaatcccaacgtcctccgcatggaatacaaggacgacgccactgccggaaacggagccaagaaggcccagtttgaaaacaagggcaggatgaacaaggccatcaccctggtcatctaccgcatgctggaaagcaagggcgtgaaaacccacctggttgcggacgtggacgacatcaacattgacgtaaaaaaggtttccatccttcctctggaagtgatcgtgcgcaacattgccgccggctccttcagccgccgcatgggcgtcaaggaaggcacccctttcaagaagccgatcgtggaattctcctacaaggacgacagcctgggcgaccccttcattaatgatgactacgcccgggaaatgaacgccgctacggaagaggaatgcgtcttcctgaagaatcaggcccgcatcgtgaatgacgtgctgattgactttttcaaacaggtcggccttacgctggtggacttcaaaatcgagttcggacgcttggcggaagatccctcccaaatcgtgctggcagatgaaatttccccggatacctgccgcctgtgggacatcaagaccggcgagaagatggacaaggaccgcttccgccaggacctcggcaacgtgatggaagcctacgaagaagtcctttcccggctccagaacaaggcttgagcctcttcccccctcccatgggagccggtcttccgccggcccccatttttcattttaccacactcttgagcgatatgaccctccactttgaagttatcagccggttccaggccgccgccaatgcggacgccctgctctatacccccctgaacgccggcctcactttccgccgcagccgcgtttacaccgtagaaatcaccggggacggacaaaaagcccgcgaatacctcctgagtgtgctggtggaccccatttcccaggaatgcacggaacagaacgcgcccatcctggaaggcgccctgttcacaattgactacggcatgaaagccggcgccctggatctggaaaaagaagccatcctgcaaaactaccgcgggcgccggaatatgggctttactatggacggcctgaaaatcacccagcgcgtgtacgtcttcggccagggagacaaggaaactctggcggcgcgctttgccaaggacgtctgcaaccccgccattcacaactggaccatcgcctaacccttttcctttcccatccacatgtccgccaaaacctaccgaaccgttcccgtaaggaacttgagcagcgacgaactgcttgaactcagcaagaaacagaagctttccctgtcccgtgaagacatggaagtcgtccagcagattttccgggaaatcgaccgcgaccccactgacgtggagctggaagtaatcgcccagacgtggtcggaacactgcaaacaccgcatcttctccgcctctatcagccacagcgtcaacggcggcgcgccggagacggtgaacagcctgttcaagacctacatcaagaagccttccgaaaagatcatggaacgcaaaccgggcttcgtgctcagcgcgtttgacgacaatgccggcttcatcgccctggacgacaacctggccgtctgcctgaaggcggaaacgcacaaccacccctccgccattgaaccgtacgcgggagccaacaccgggctgggcggcgttatccgcgacatcctgggcgcaggcaagggagccaagcccatcgcctccctggacgtcttctgcttcggcgctccggacacgaatccggcagacatcaccgccccggacgtcatccaccccctgggcatcatgcgcggcgtggtgcgcggcgtgcgcgactacggcaaccgcatgggcattcccaccgtcaacggcgccatccagtttgaccccacgtacatttacaaccccctcgtcttctgcggcaccgccggcgtgattccgcgcggcgacatcctgaaggaaatgcgtcccggcctcaaggtcatcgtcatcggcgggcgcacgggacgggacggcctcaagggagccacgttctcttccgccgctctggatgaagcctcccatgaggaagacttcaccgccgtgcaaatcggtaacccgattgaagagaagaaaacgctggacttcattctggaagcgcgcgaacgcggcctcatcgtctttattacggactgcggcgccggcggcttctcttccgccgccggggaaatgctctccgtcacgggcggtgaaattttcctggacaacgcccctctcaaggaaccgggcctcatctcctgggaaatcttcctgtcggaatcccaggaacgcatggttatggccgtggaggaaaaagaccttccggaactccggaagctggcagacaccttccagacggaactgaccgtcctgggccattccgacgatacgggaatcctgaaggtctggcacaagggggaactcgtctgctgcctggacaactccaagttgcatgacgcccccatcaagaagctggaatccgtattcactcccggcaaggcgctcacgggccagcccctcccggacaaggatctgaacaaatccctggaaaccgttatgggggatttcgccatcgtttcccgggaacccatcatccgcgagtatgaccacgaggtgcagggcaacaccatcctgaagcccctggcgggcgcccaggcggacgctccgcaggacggctccgtggtggacatcgacggctcggacaaatgcatggccatggcttgcgccattcttccggaatggggcaaaacggatccctacgccatgggtaccggcaccgtggatgaatgtgtgcgccagctcatcctggttggctccaacccggacaaaatcggcctgctggacaacttctgcatgggtaatccggaagatccggcggaactcggccgcctggtggaatgcgtgaaagccatcgccaaggcagcggacgcgtacaatgcccccttcatttccggcaaggactccttctacaactattttgaaacggaagacggccctatcaacgtgcccgtcaccttcctctgctccggctttggtgtggtggaaaacccggaccacgtcatcggttcttccctgaggcggagcaacagcctgctgtacctcatcggccatacggaagatgaaatgggcggttccgtcttcgcccgcacccacggggtggaagacggcaaggttccccagacggactgcgccgcgaacatggaactgtacaaagcctactacggcgccctgacttccggtctggtgctctccgcccatgacgtttccgaaggcggcctggccgtcacggcggcggaaatggccttttccggcaagggaggcgttcggctggatctcacgaaagtaccgaccgtcaacggctggaaatcccccgcagtgcctctgttcagtgaaagcacgggccgcatccttgtggaggtggatccgggattcgccgcggattttgaaacggctatggacggcttcccctgcgcctgcatcggcggtgttacggaggaaaagcgtctcacggccacctgctgcggcggagaaaaggtgctggattgcgacatagccaacctcaaaaaactctggaaggacggacttaccccctattattgacctcctgaaaccggcatcttatcaaaccatcgatttatttctaccaatatgcctcacgcacttttactgaaataccccggcaccaactgcgatgtggaaacggaacgcgccctgcgcgcggcagggttctccacccagatccagcccatcgccacggctacgccggaacacgtcgcaaaatcccagcttgtcgtcctgggcggcggcttcagctacggggactacgtcaccagcggccgcctggcccagttggaaacggaacgcttcctgggagatgccctgcagcggcaccatgccggaggaggcatgctcctgggcatctgcaacgggttccagattctcaccaagctgggcattcttcccgactccagcctgattgacaacaaaaaggaacgctttgaatgcgtctgggccaaactggtgaaagtagccaggaactctcccttccttcaaggcctgccggatgaattcgaactgccctccgcccatgcggaagggcgcctggtcacccgtcccggagatgcagaaaaatacctggctgccgggaatgtggctctccagtacgtagacaaccgcgacggctgcgaatgcagtatcgccggcctccaggattccaccgggcgcgccatgggtctgatgccccatccggaacgctttctgctgccccgccaccactatgacaaggactgggccggcaacgaagactggggctgggggtacttcctcttcaaatccgcctttgacgccctgaaataaaggtccatttcccattaaccgctcccctcacattcattccatgacagatacggccctcatcggttcttcttgcgccctcggcgttttctggtcctcaaaacggtactttgactacctgattgatgaaaccaacctgtccctgctgcgcggcaaggaattcgggcaggccgtcattatctgtccctccctccgggaagggggcacggccattcgggggaatacggctccctttctggctcaggttaaaaccctgattgatctcctgcatgaggtgaaggcggaacgggtgacctacatcaccagcattgacacccagccggaaacgggaaatgaactttctcccttgctccgagaaacggaggacgaatggctggcggctctggtagagctgaaagacttcatcaacctccggttcggccgcgtgctgaacgtttaccttccggaagtcaccggaacgggagcaggcatgagtgtggcggatctgctggcagcagttccggaagggacggaagagctggacgtagccctgctggaacgccaccagctttatcccatgcaccgcctggtcagggatgtggaaaaagcatgggagtgcggcatcttttccgtgaatctggtgccggaacccgtcacggcctttgaactggtggagcagtgcttcccttccctggtcaaccgcctccccgtcgcgaaggaaacggacccgtacgggagcgccagaacatccgtttactccacgcagtaccacgatccggacaccggttatatcatggacaagcaggacgtcctggcggggctctctccggacaaacagtcctagcccccggtcagcccccgtctgcgccctgtgcagtcggggctttttatcccccaccttcaaaaaagctcccccgcaggagccgtgctttcctgttgagcgcattccggaacggtgctatacaaaagccatgaagattagcgacgacagccttgaattcttaacggaacttctggaaacccccagcccttccggctttgaaatagatgcccagcgcatctgggcggacgaactgcgcaaatatacggaagacgtccagtgcgacacttacggcaatacctgggccgtcttccacgcggacgcggaagaagcccccacattgatgattgaagcccacgcggatgaaatcggcttcatgatccgccatatcaccaaggacggcttcctgtatgtggaacgcgtaggcggcacggatacggccatcgcacgggggcgccgcgtgcgcttcctgggttcccagggagaagtgatgggggtgaccggaaacacggccatccacttgcgggaacccggagagaaggaacccaaaatctgggaaatttacgttgatgtaggtgcctcctccgacaaggaagtagcggaactcggtttgcgcgtgggccatgtgggcgtttactgcgacggccccatgctgatgaatgaaaacaagctggtatgccgggctctggacaaccggctgagcggcttcatcctgtcggaaatagcccgcaagctgtgcaagctgaaaaagcccgtctcctggaacgtggtgctcgtcaatgccgtgcaggaagaagtgggctgcattggcgcgggaatgattacccaccgcctgcgcccggatgcggctatctgcatagacgtgactcatgccacggactcgcccggactggacaagggcaaatttggcgatatcaggcttggcggcggccctgcggtcatccacggcacggccaaccatcccaatctggtggcccgtctggaaatcgtggcggacaagaacaaaatacccctccagcatgaagccgccggacgccgcaccggaacggatacggacagtatctacatctcccgcgacggcgtagcctccgcgctggtgtccgtccccctgcgctatatgcactccccggtggaaacggcctctctgacagatgtggaaaatacaatcaagctgctgctggaattggtcaaatccctgatgccgggagactctttcgggcacaagctgtaatacggaacggacggcagcattgctgacaaaatgaggacatgaaccgtcctgccgggggaaggcgcacaaaagcgtcaatttcccccggcatgcccccatgcggcagcattcaggccgcatctcccctttgaagcaggggcggaactactccctgcaggcatcctgcgtcctcatacggtcattctccgcttcccggcggtgcttcctgttcaccggcccctggcttccttttccggaatattttcccggaaaccattacaggccggaaaccggccggaactctttctcccggtcacatttcactgaaatccagccgggatacattaaagtacgtttttcccttccggcaggaatcccacaggagaatcagcatgagggaaaagaggaccagtctccaagccacttcaaagggatagctggttaccaccctctccacaccgatgcagttgcaggaaagggaaagccccctggcccagccctggacgaacaacgccacgaacgtgaacgtaagcgcactgcccagcagcgcggccccggcgcaggttctgcggaacagaagccccaggccaaccgcaatctcgcacgacactcccaggcaggccagaggatgcccccaggcctccgggaaaatggcgaaacggtcgatcgtctcctgaagctggtccagatgaagcagcttgcgcgccgcgacaaaaaggaaaaagccccccatccccagccggagcaggagcaaacagaaacggacgattttttcctttagcatcattggcgtattccgattattcgaagtgggtttgctgggcgcccactttttcattgcgcaacctgttcagttcatggcgcactttttccagctccatctgaagggatttctcccgttcggaggcaggagcctcggaggaagacggcgtaccggcaaccttcttcgcgctgcctgcggcgtcttccgtaaagagcattttcaatccgggagccttcgtgtcaaaccttatgacgccggaaacgggcttttgagaaccgggatgcttcacggaggctctcaccgtcaccgtgccgggtgttgaccccaggcgcaccagggccggagcggaaccccatttaacggactgggtcagcgtgccgtccggggaatccgtcagcagctcggcggggccttccacggaaaagacaatctcctcatcattcaggcgcttcactgttccgcggccatccgtaacctccgccaccacggcaaacacatcggaaccgttggcgcacaaatccactccatcttcccggtccagagtcaaccggattttctccgccctccgggccgggcggacttcatgcctggtcaccaccttgccgcctatcaggccttccgccaccagtttcaccgctccctccttgcctgctcgggcaagcttcttgttttccatgaaatcccaggctttagggaacacgacgggcacgcgcttgaggcctccgggacaggacgccaccttcttttccaccgggggccctccgttgacactcaggcgaacggaatcacaattggaaaacaccgtcacgtcttccggagaaaagggagtgcattcattggcgatgtgcaccacagggccggaacccaacccgttgcgcgtcttctggggacgctgggacataaatgcgtaataggaggttttgggctgcctgaaagcatccagaataccgccgtagaagggatccggatggtaaccgcgctgatggtcgaaaggatgccacaggcagccgccgaaatgataggccggagcggtgttcagcgtatcgtacgtcgtatatgggaacgaggtcttgaggtagtgaagggcctgcaccatcatgggagcttcaccccagtgacgggctacacgggaggtggagttgtgggcggaccaggtatccacgttatcaccgaattcacgggtgaaatacggtttgctgttcttccgttccttgacggaccaatgtttgtcccccgtaaccgggtgggcatacagaacttcataatgctggctgccctgagccaccgcgtcgcaagcggtgtagcatcccttgtacggatattcctcatgcaccaggtcgcgggcctttttggcgaaatccgccgggtaatgagtttcattcaaaataggttcccacatcatcacggagggatggttcctgtcccggcgcaccatctggcggatatcgtcatacacccggtccgcaaaagggccgctgccccagaactgccagcccggcgtggcgacgatgacgaaaaggcccagacggtcgcaggcgtccatgaaagccggatcctgcggataatgggcgctccggatcacgcgcatgcctgccttcctcaatttcacggcatcctgccattgcaggttgttgggcactgcattcccaagccgggcaaaatcctggtgtctgttgccgccaatcagcttttcaggaaacagggatccattgagcaccagccccttttccgtaatttccaccgtccggacacccacccttatggaacggttgtccagcaaatgggccggatctttggaatggtcccctccagcagcgtcccatacttccacgctcaacgtgtacaaatcgggattgtccggagaccacggtttcacgttggaaagcacaagaggaatatccacttcacccgtggaatggggcggaatggtcagcggaaccgtctccccggcaggatccacccccttggggtccgtcatcaccgcctgcacgcgcaccttccgttccttgtctgtctggttggccacctgaaccttcactcccaccttgcccttgcgggtgcggggatcaagagattccgtccggaaaaaaactccccccccggcgacggttccggcctcgttcgggtccgtgatatacacgggtccggtggaaatgaggtacacatcccggtaaataccgccaaaataggaaaaatccaggccctcctggggtttgccggggggataggaagcgtcgttggaattgtccgccttcacggcgatgacattcttttgtcccggtttcagccacttgtccagattgacaatcacgggaagatatccgccgaaatgctccgcggccttctccccattcacccagacctcgctctttcccatgatgccctcaaaatacagggtgtttctcctcccctccaaccgggagggaggaataaatgttttccggtaccataccggcccctggtagttggaacagccgctggcctcttccggaagaagctcaatgccgttggggaggttgacggactcccaggaggaatcgtcaacatccgggctggccgcttcctccggtgtcttctctcccttgaacagtttccagcccacattcatgccgtaaacgtcccttttcgttacgttttccggcaggcgaagagcccctgccacggaataggctcccgtagatgaagcggcctcctcctgatcggaaaccgcatcggcataaagggaaaaagagccggccagacatgccgccgttatgagaatggtagtgactttcattatggaataggggaatgcaaaattaatatacggagctcccccggcgccatctttcattcatataatacatccttgcgtataatgcaaatacatatgtcatccggcatcttccgcttgacctggaaggcatgttttttcatagtcgactcgccctgtacgggattatcccgcagccccggtccgagtgccaggttttcagtcccgtgaaaaggaaaaagcgaggcgttcctccaccggctgtctcagggctatgcctttatccactagttttttatgtcatctttctttcagaaaattgtcaaacttttctcctatgacattggcattgacctgggcaccgccaacaccctggtcaacgtcaaggaccagggcatcgttctgcgcgagccttcggtcgtcgctgtcaagggggacaaggttctggccgtgggagacgaagccaagcgcatgctgggccgaacacccggctccgtcacggccatccggccgttgaaggacggcgtcatcgccgatttctacatcacggaggaaatgctccgctacttcatcaaaaaagccacggccaggtactacctgattaagccgcgcgtgctcatcgccatcccctccggcattacggaagtggaacgcagggccgtcaaggaatccgcggaagcggccggagcccgccgcgtgcatctgattgaagaacccatggccgccgccatcggtgtgggccttccggttcaggaagctgcgggcaacatgattgtggacatcggcggcggtacgacggaagtggcgcttatttccctttccggcatcgtttacagccgttccgtccgctgcgccggggatgaactggacgatgccatcatctcctacatgaggagaacctacaatctcatggtcggggaacgtactgccgaagacatcaaaatccgtatcggctccgcctatcccctgcctcaggaactctctatcgaggtcaagggccgcgacctggtcgcgggcctgcccaagacagtgacgattcgatcggaagaagtgcgtgaagcgctcacggaacagctcaacacgattgttgacgccgtgcggacgactttggaacgctgcccccctgaactggccgccgaccttgtggaccgggggattgttctggctggaggaggcgctctgctgcgcggtctggatcagctcctgcatgaacagacgggactgcccatccacattgcggaagaccctctgagcgctgttgcggaaggtaccgggaaagccctccaggaactggacttcttcactaatgttactgatgcggaagactaaagacggaatctccggagcaagcgctccggccttgcgtctgccgtactgccgcatcacatcaacgcaactgcctgcatgattcctttccggccatccctacagcttcaactccagccgctcctgacgggagacggcccaccggaaacattacgggcaatagcacaccctagcttattctcaccccgtgtttacaaaaatgcttaaaaaaatcaaacgggccttcggcttcggatcctgcgatcccatggaaggctccactatcatcatcaatgccgaaaagctcgaacgccgcgtagcccttctggaaaacggcgtattggaagaatacaccatcgagcgcgaaggcgaagacaacatcgtaggcggcattttcaaaggccgcgtcaagaacatcgaaccgggcctcaaagccatgttcgtggacatcgggcaggaaaaaaacgcctttctgcacttctgggacgcgcttcccgctgcactggactccagcctggaagaaatcgaacgcgaaggccgtccgaaaaaacagcagcgcaaaatcacgtccaaagacatcccggacatctatcccatcggctctgaaatcatggtgcaggtcaccaaaggaccgatcggcaccaagggtccccgtgtcacaacgaacgtatccctggcgggacgctacctggtcctgatgccttttacggaccagttcggcatctcccgtaaaattgaagaccccaaagagcgcctgcgcctgcgccagatcatgcagaaactgaatgttccggacggaatgggcatcatcatgcgcacggtggcccagggccagcgctaccgccactttgtccgcgacctcgccatgctgctggaacaatggtacagcgtggaagaaaagaaggaggccaatccggcccccgtctgcgtgtacaaggagccggacctgattgaacgcacagcacgggatttccttacggacactgtagacaacatcatctgcgacaacgcggaaaccacggaacacatgcgcgccattgccggaaaaatctcgcgccgcgccaagcgccacatccagcacttccccgtgcgcacgcctatctttgaagaactgggaattgaaaaacaaatcaatgaagctttccagcgccaggtgctcctgccctgcggaggctacctggtgattgacgaaacggaggcgctgatcgccattgacgtcaacaccggacgcaacaagggcaccaaggatctggacaagaccattctggataccaatctggaagccgcctatgaaatcgcccgccagcttcgcctgcgcaacatcggcggtctggtggtggtggactttatcgacatgcgccacaggaaggaccagcaggccgtttataaggccatgaaggaccgcctgaaacgggacaaggcaaaaacccaggtactgcagatcacccccatcggcctgatggaaatgacgcgccagcggctcaacgagagcctcagggaatccgttcatgatccgtgcccgtactgcggaggcaggggccgcgtcaaatccgtgatgaccatgagcgtggaaattcagcggcaaatttacgcctgcatccagaaataccgggacaccatcggagacatggtcatcgtcgtcaactcggaagtgctctcccgcttcaagaatgaagacgccagcctgctcatggaactggaacgccagcacagcggaaggctgattttccggggcgaccacaaccagcaccgcgaatccttcgccatttacgacgcccggtacgacaacaaacccctctaccagtccgggcaatagcctgaaaatcaaatccggctttccgggccgggcgataccctcgcccggccttttttacgccgccatgaacaacatccccacttcccccaacgaccccgtcaacacggacattctgctggtggcggaagaccgcatcaaagggttccgccgcctgccctttcacgccatttccgaacaatgcggacatcctgttccggtggttatccagcggctgaaagccatgatggaggccggagtagtgcgtcgcgtgcgccagacgctgctggcgaccaagctggcccagggagccctggtggcctggtccctgccggaggaaaaactggatgccgcttttgactggatgaaggagctggacccttttacgggccatgtggtgctccgcaatacggatgcggccaaccccggcgccaactacaggctctggaccacggtcaaggtgcccgtggggtgcggtacgccggaggaacactgcggcatcctgaaacgccatatcggcgcagacggttatgttctgctgccggcacgcggcgtttttgcgctgggggtggggcacatgcgccgcaggggactcaggcccggagaaaaaactccggaaccggctcccatgcaggaaacgaaaaccgtctctctctcagaactggaatggaaggtgctcctctccgtcaaggaacagctcaggcctgaggaaatggtggaagatccctggtccctccgtgccgcccgggcaggattggaaacggaagaatactgccgtacggcggaagaactggaccggaagcaggtcatcggccgtttcgccacttttctggaacatgtgagagccaaaacggacgacggccccgttaccaaatacaacggactgttccattggacggttccctccggcatggaaatccgggctggagcggaatgcgggcgccacatctgcatgacccattgttattggagaacaggcggagatgtttttggaggagcgcaaatcatgggtgtggtacacggattggaaaaagatgccgttctggagcacaaggcggcgattgaccgccatctggaggcctccggcattcccatcctccacacggctgttttctggggtgaacgttcggaaatcaagccttccgagatttctccggaactgtataggaaatggatggaagaagtaaaaaaagcccccgttctgcagtaactcccttctccacgcctgcctccggcagtcttcccctggggtagaacagcttttccctccgaactcccgcgaatgccgtcgcgaaggcacaagcatttttaatgccgcaactgagatgccggctgtttcccctccctccgtcctgcagcaccgcttagttccctattcccggcctatagcggcttaataccgttttcccggacgttccaggatctttgatatattttcctgtcaattcaggaaacgggactgaagaaatccgtttcaagccttcagggagacgcacgcctcaacctgatgagctattcatgttctcctttgctccggcgctgtttcctttccgggatacaccgggagaggcttctgcctgcagaaacaagaaaaactcaacacaagggccgtctccccccttacggggagacggcccttattaaagaaatatcggccggcgaacaacctgccgcgaagctttattactgctttttctgcggctgtgcgggagcctggtcaggagccttggcaggagcaacagcggccggatgcttgtaggaaaccgcaaaaccgtcatacttggccggcagcttcctgtccgggaacatcagttcatgcaaacggtacagggcagccgcttccttgacaggagcgggacgggacttcagccgtgaatccggaatcacagcttcgggattattcttcctggattccacggcagatgagacgacgggattctcaaagaatttgacaacatccggcatgcgcaggtaggcatccagggagcgggccacgcaggcagacgccagttcttcatcggaaccatgcagcaaaaccagggcttccgcaaaataatccagcgccttgttccaatcctgggccaccatggcggccgcacccagggcatatttcatccgcgcctgctggaggcgggtggcattctttttggttgccaggaaagaaccggcacggcttttcacgccgttccagtccttatctggaatcaaggccatgatttttgccacctccaggtcattctggacggaaggggacaaattggcccctctgacgggaaacttggccgccaaccctttgactccagcccaatccatcatgcgcatggcgcactccagttcatagacggccgcccgggcggacaggctgtccttgatggaaagtgttgaggcatacttattcaccagagcgtggaatttgttgcgggcttcctggtacttccggttttccatagccaccttggcatccacaaagtcgtccgtttcaaaaatatacagcgtcttgaaggcgctggccatctgctgaaggacttcctgggattccctgctttccacaaactggaccgtgggtccattggaggaaagaatgtagatatccgtcggacggccattcttgatggtcggtgcggcaactctggcgcgcaggcgctggggattctgggcattctgggccatggacggaaccagggaggacagtccggccaataccattattactgaaagtgctttcatatgattgattactaaacctcttgttattatttctggcccttggcggcgcgtacggctgcttcataggcggcaatgtccgcccgttcctggctgacggcaggatcggaaccgaacttggccgtcttatccttcacctcattgaccagggcactgtcctccgccgtcatcttcttgcggttggcgggagtatccagcaactgcacgtactggctgccggccttccaggcaacgtacctgtcggaaggctgcttgcccgcaccctgggacatcgtattcctcttccacagcgtatccatctgtgccagcacggcgggggcggaccacttcacgagccccttgtacgtacccgtgatgttcatgaagttaatcaacgccttgtccagctcattctgcttcaggtaggcttcaccctgcagatagaggacttccggcagattcttcttataggtcttgttttcgcggtacttgtcggcagcggcaatgacggccggccagtcctggcgggcggaagtgaacttgaccagattgtactgggcgtcttccatggccttgcggtccgggttggagctggattcttccttgctcagttcatccctcatcatcttgatggcggtgtccaccttggcgttatccttgctgcgccccagagctacggctttcccgaagaccgcattcttgcggtacttggacatgccgttgatgcgggccttcttacgcaccgggtcaggttccgacgggtccaggatttcatcaaagtaggagatgctttcttcaggctgggaagtgccggccaggtgcatgccaagcttcacaagcgtgtacgggggcagatcggaaggcttgaagtcgcgcttcagctccacgaagagctgcttgaccagaccttccagggcggctttctcggcacgctgttcgtccgtctccacaggagccttttcataccgttcctgagtctgggcaataacggccatgcgaagcatggcgctcagcgtcttgtctttatcattgtccacgccggggaaccggtagaagtggttgcgcatggcattggcatccagattgcggcccagggcctgattgccggccatgtacgtcttggtataggaattgacggcctcttccagaagaacggtcatcttgggatcgtccttcttgccttctctcacaataatttcctgcatcttgacggatgccgggtcaaacatctccttgtcatccttgaagaagtccatggcggcggcggccagctggaggctgtagcggctgccgggctggtcgctgtctttccagtactcgtcataccatttcttgacctcgtcccggcgcgccgtcctggccgtttccacggcttccttcggttctaccggaagaggcttcttggtagcgttaataaacaggttgtacacggcttccgcagcgggacgcttgtcgcccagcttcttggcggactccagagcggccaggaaatagccttccgcttcctgctcatgctccttgctgccggcacacagattagccagcaaattgttggcatacgggaacaggcggtggtccttgaaattgtccacaatttccttcgcatctttcgcggcaagctcttcgtctccggggttcttgcggttcaggtagttgaaggcccggtcatacaatacggcggccatattggcctcccccttgtccgggaaacgggcaatgtaattggtaaaggaccggatggcttcatccgtattgcccaggttcgtgtaggtttcaccaagaaggtacatggccgttttcagataagtgctgtcacggtattccttcacgaagcgttccagcaccggcaccgcttccttataacgggaggcgtcggcagcccccaggttgaacagggaggctcctttgcagtacagggccagttcatagaacttatgggtggggtcatccttatgcagctccatgaccttgtccgcctgctggacgcagagatcgaatttcttttccttcagaagcccttccaaagacagcgtattaagcatgggggcatacttggaattggggaattccttcaggtgctgcgccacaagctcgccacccttgtccgcttctcccagctgccaggtggtcatcgccagataatacaggttatcctccctgcccggagcatccgggtaggattcattgataagctggtaggcggcgcgggcaaccctttgggaaccatgcaccagggcctggttgcccataaagctgaacgtgaaggcgtccatgacctttccttcctccttcatcttgttgaactggtcgatcagggccgtcaccttcgctctgtccagcgtatgggaaaaatccgtcacgccaggcacggcgccattggcacggcccagacgatccagggaataattggcatccgccattactccggactgatcgggaagaaggcccatcagcaccatcgccagggaagcataatcttcagactctttctgctttccatcctgaagcagggaacgggatttctccagcacttccgcaacgtaactcaccagccgcggggcgtacaaagccacacgcgtggggctgatattcatcacggaagggtagttttccacaaacttcaccgtctcactgcatttgccggtcttaatggcggcatccaccatcgccaggaagccattggtaataacggcatccgtaatgcggcgccccttgtagcgcgacgtgacgcaagaggtaaggttttccatccctttttcaaaagcaggcggggacatcttgaaatagcactgggccagaagcccctgcacttcaccggcattgacgtttctggcgacaggatcgctgcggtattctttcaggaatttttccagtagctccgcacccttggcaaaatccccaagacggcagtagttttccccttcccggaacagggccattttcacgagctggtttttagcgctcgggaacttggtgtaacaagccttgaacgcttccacagcttccttgtaattcttcagctgggccagacagacgcccttctggtaatagaaccagccgaaaccgtcatccagccccagcattttgatacggggttcataaacgcggatgcagcgatccacggcatccagggcttcctgccacttcccttctttgatggccgtcagggccgtgcgctggtaatcgcgcgggccatgctgggcgccggatggaagaaccgccccgatactcagcacggaaaccaggcctgcagccagtgcagtagtatagtttgatttgatcatgtgtttaaaattcgttgaaacagaagagataataaaacaggcgcaatatctgtgcaaatacacggaatacacctatctgtaatggattgcgtcattttaacaggatgagtcaaactctaaagaagaaagttttatctttttagtcatccttgcaagaaagttcttccaccccgcgtctatccggagttggagcaggtctgtgccgcccggccggaaaaatactgcccggaaaaaaggctttttcaatatccctctacacactctgcggccaaaggaatgcacgctttccgctttcaaaagtttttcggtggaacacagcccactgctccatcatgcccttaaggagcctcgaatcccgtctgtcaggataccagaggcacatttgacatggcgcaaacagatcgtccacccaaccggaattccatttttccggcatccgcagccatgccggccttctccccggcaacagccatcccctcccctctcagttctcctttttcaacatgaaatcccatccgcgagttgaaagggaatatcatgaaaaacggtgcggaattaacgcctccgtctttccaaatgaaaaaacagctatccccccacgggagggacgggaaaaaatacacttcccggaaaccatcaacaaggacttcctgttactgcacaataagataaaggtttcgagccgcttttctccctgctctgctgcatcctcctttcaatatactctttccatccctcccgtgaatgaacaggttttctgaagccggcccttccaatactctcctgactgcctctcctcctcccagccacacacggaatgcaatactggaaaaagacggcaacacttctcctgaagtttcgttcccggacagaattcacggctatccgcctgtcacctgcggtcccacaaaagggaaaaacggattcagcaccgggccaagaaaggagtattgttccggccaaaactgcatatccccaccagaacatttaccgtacaacaaaaagggcatggtccggctccggatttctctacggggcttcccccccttgccgtaaaatgctgccgtatgcgggcctccgtttctcccgtcaataacaaaaaaagcttccgctccttttgagagcggaagctgagagtcaatgaaaaaaataaaggtaatttacttttagtcgtccttaaggtcggtcagagccaccgttgtaatcccagcctccgtcaacgcgttcatgacgtcaataacgcgctggtggggaacatccccttccacccacaactgcactaccggcttggtgcctacagcgctggcctcctgttttttggcttccagctgctggacgagcgtcgccaggttgtggttgttcatgtcattgtcgatcatcaggctgttgtccttgccccagtagattgtgccgtccttgataatacgaatcagcgccggttcaatctgggaggcgttttcacccacggactgccccggcatggacatatccaatttgcgttcctgaaccaaggaggtcgctacaatgaagtaaatcagcagaaggaaacatacgtcgatgagagaggaaatatccagtttgggatcttcatcctcgactgcctctagttttttatgtcttgccatagcgcgtaatgttattcagccttggttgcaggagaggaattcttggcaggcagtacggcaaagatcactttgactacgccgcattccgcagccacacggattacttcccgggagcctttgaacagagcctgctggtcaccccgcagatagaggcgcgtttcaaaatcctgcttgtctttgaaacgttccacaaggtttttgatgtattccttgagttcatcagaagaattgagcggggtacctacgtcagaggaccagagaacgctgggatctacgccgggcggccgcttacccgcgccttccccataaacattcaccacaatgcagccgttggcggatttcacttcaccggagctgctggccgtgggcatctgaatgttcttatcctttttaacggtaatggccgtagcgttcaccacgaagaaaatcaacaggaggaaaaccatgtcgatcatgggggacatatccatttccccattttcttcttcaggcgctacattagcttttttcttacccataagctacattttgttgaggttttccggcccggttccgactgagcggacgcttccgggccggaccgcctgttccggcaatcaggccagaccttcggggatgcgggcaagctgggcttcggcattcaccacgttgatggaggtgttcaccatttcctgcacagtgcccacgcattcggcaatctgggcgttggcaatgcccttctggaagaagaagaacggagtggcgataatggcgttgatcaatccccagaacgttgtcagaagagccacggaaatgtcaccggccagctgggtggggtccgcctggccggcggtagccagcgtaccgaacgcgcccaccatcccctgcaccgtcccgaacaggccgagcatgggagaaatctgcgcgcaaagggccaacatgttgatccatttgaacacggaacggctttcattggccgtaaagtcggccacggcgtcttcaatagcatctttgccgaggtcttccggacgggtagcgtccacgttcggcagggcgtaggcaaccagacggcccaaataggtggggctgccggccgcaacttcaatggcggaccggatgcggcattcggccatcagctgcaacagagtgaccttgagatcttccgggcagaatttttcctttttcagggctaccatgttgtaaatcaccaggaaaatgatgaaagcttccaccagcataatcggaatcatggtccaaccaccggcgatgatccatttgtcaagcatggtctgttcctgcggggcaacggcttcggcggcttcctgagcgaaagcagatgtagaaaacgcagccatcaggacggaagcaaatgcaacgaaacggaaacccagtctaaaaaggttcttcataatttaagttatatggttgttcgaaaagatactggtgtattaaagcatgcaaattcagacttgcaagcatcattttagaccctgtaaaaaattcagacgcctgcgcagccgctctcccgggccagccggctgcagatggggcagcgccccccgcatccccgcgcagggcaatattcacggccgtacaagacaatacgcagatgaagatctccccacgatttttcagggaaaaggcttttcaaatcgcgttccacggcttccaccgtttttcccgcgctcagcccccacagccgtgaaaggcggaaaatatgggtatccaccggaaaggcaggaacgccaaaggcctgaaccatgacgacggaagccgttttatgccccacccccggaagagactccagagcagcaaagtcgcaaggaacctttccctcatatttttccaccaggatgcggctgaggttcacgatggaggatgccttcctttccgagaggccgcagggcctcacaatttcccggaccgcttccacatcctgccgggccatttcctccggggtggaggccagggcaaacagagccggagtcaccagattcacccgcttgtccgtacactgggcagacaagagaaccgccaccagcagcgtgtaagcgtcacggtgcaccaggggaatgggaggaaccccgtacagggacatgagttcctcctggacaatggaagcccgtttttccgtattcatgccgccagattaccactccgcccgcacggcggaaaataaaaaagcgccgccatgcagcgatggcggcgccgggatggaaaacatgggtcagtcggccttggcataaaaccccttggaaacgcggtgctgcagggccgcatacatggcgcggcagtgcctgtagccgcgacggctgccgagcacctccagactgttggcgggatctccccagcggacgatagtcagttccacataacggcggccccattccttcatcagctttttgttgggctggtaaatatcaatggttccggttccgaccagggcgcttccgtaatcatcaacaacgtaaaggtagggctggcccttgatgcggaaagtagtccccaagggataaacggaccagtctgcagcggcgctgcggacggaagacgtgtatttcagcgccgtaccgacggcattccggggaccgtaggccaaatggtctcgttcggaatgggtataagccgtggtgcgcactacgcgggtgcgctgggcgggatgataaaacggcatcttgtgcttgtcgcgccccaacttgggaagtttggaagaaggcgctgccgaacgactgggtgccaggggctggacgaatccctgggcagtttcacctacacgggccaaaacaagagcgtcactactggatttccccatgccggttacagcgccgtttgtcgaacagctgctgacaaacatggccgcgacggcacaagacagggtggcaattattcttaaattcatgcggtacgaggttaggcgccatacacatggcagtcactccggcaaaaccttcaggccatgtgcggaagccggaaaatcggcaacggcggctcttgggtacgaaataatccctgccttggcaaccctttttttccgcccaccccctcccaaacaaggaaaacctattaatataaattactaaaaataaacaatatataaaacatgccgcatttttgtcatatcatgacaaataatatacttcccgaaatacttttttctatcacaacacgacacacttttttatttttatcatatttcatttataataaaaaatttacacgcatgaaaaatacacaatccctcaaaaatattccctgaaaaaagtgtcaggggctgtactccgcaaaggcgtcatgagcaagaaaaacgcgtctcccgttgaacggatttccctctgccgttcaaggtttcacgcgaatcctaatcgactccttgccatatccacattttcacagcccttccatgcggcagaatgaagggctcaggaagaggttggtgagaacatacccttataaggggaaaccggaaaagtccggattctgccgggtaatgttcctgccgcagaaatgcgctatgggaaaagatgcgcaggcccggttgaaaaaagggctcccctcccttgccgctgtcttccaaattctggataacgctcataccagaaaagcatatccagccggagaaaaaactttcccctccgtttaacggtatctaacgcgggaagggagctcttatggaatttttcttctttcccattcccttccgggcggccttccataagagtccccggcgtttcacccggcagacgggcacataccgaatgggctgttgcatccatccggaaatagattacactccggaacgaacatgtccgccggccttccccaacacctcacgctggattatctacgcgccctgctatcccggggcgtggagaaaaccaccgtcacggaggaagccagaatggttctgagaaaatgggtcatggacgcgcgccggatatccggaccccccccccccgcttccgtttccgccaagcctgccgcaaatgaaacacggccgaaacagcccaccccggagcagacgcctccagattccgtggatgaagcatccttcggcaatgaactccgggatatcctcaacggagtacagccgcacaaaacggaggaggatgctccggtaccccgccatatttcctttgatctggaaggtgaaacggaggaagaaaaactgtcctccctgcgggagctggtcgttaactggccgccgctccggaacatggattccttgagggaaacgcccgtgttttcctccggcaatcccagggcggacatcatgatggtaacagacgcccccggcctatatgaagaaaaacagggggttcccctggccgggccttccggacaaaagctggacgccatgctgaaagccatggggctttcccgttccgatatttatctgacccatctggtcaaataccgcccggccctcccccggcagcttaccaataaccgcccgcctacagaccgggagatagaaatttccctgcccattctccgggaggaaatcatgctggtgcgcccgaaagtagtggtggccctgggagcaatctccgcccgcggcatcctccagtcaggagagacgcctctttccgccctgagaggcaccttccacacagctttcaacacgcccgtgcgcgttacttataatcccagttatcttctccgcacggaagatatttcagaaaagcgaaaggtttgggaggatatgctgtgtgtcatggaacaggcaggcctgcccatctccgaaaaacaacgttcctatttcctgcccaaaaagtaatatatggattatttaaacagtattctggagcgcaaacgcgccgatttgaaaaaacttcttcccctggaaggaaaattacgggcctccgccatccagcggaacgactacgcgggattccgcaccgcggtggaccttggggaaacccgcctctccgtaattccggagatatccagggtacatcccgccctccgcctccgggaagcagcccaggatatccggcacatgtacggcatgttcctccagggcggagcgcagggcatttccatcgctgtggaaccggaagtatacggcgggtcatgggacatggtttccactgtttccagaatcagttccattcccgtcatggcgcgcgacgtgttcattcatcccgccatgatctgccaggccatcgtctcgggggcggatgccgtcaatctggtggcggccgctctgccggcaaaggatttgtcggagctgtaccgcatggcttccgggctgggattggacgtgatgatggaggtccataccctgaaggagcttgaaaccgtcatggatctggaagcggaattcatctgcatcaacaatgcagacccgcatactctccagtacaatcctgcagtcacggagaaactcattgaagaaatacccgcctccgtcactgtcctgtccgcagggggcatccgcaccgtggaagacgcgcgccgcatgctggacgcaggagccaatggcgtccttctccaagacgaacttgcccgcatggatattccccaggatttcatggaggccattctggctctccgggcggactgagtttccactcccgctatattatcatagaaaaacatctgcatccgcatggggaaatgcggggctaaagagattgtcccgtccgctgcggcagggcttcgcgacctgagctccgtatccgccgcgtttccttcccgcctttccctgccgtcttttcatgaagcgggcaaatccttcgccccgaatgctccgcggatatgcctgaattccggaggcatcccttccctgtacaggacttccacaacatcgtaacgggaattcaccggttccggaagcaggcgaagccattccgccgctccccggcgtatcagcgcccttttacgggcattcacagcgcggcgggcacctccataaccattccccgtacgggttttcacctccacaaaaaccagacactccccttcccggcacacaatgtccagctctccgcctctgacgggacgccagtttctcctcaggataacgcacccttccgcacgcaggaaggaggccgcagccagttccccgtacattcccagccatgccgtatcccgcttacccctgctcagggatggacagttccatttgtgaaaccggcgcaaacgagcggcgatggagcggacagggcccatgccgccgcagagcttccatgtgggcttttgtgccatatcctttgtgttttgcaaaaccatactgcgggtaggaagcgtccgcttccatcatcatgcggtccctcgtcaccttggccagaacgctggcggcggctatggaaaggctcctgccgtccccctttacaatggcgcggtgcggcacaggaagccccttgacaggcaatccatccaccaggcagaaatctgcacgcagggccagaccttccaccgcacgcgccatcgccagatgagtggccctcaaaatgttgaaccggtctatttcttccacggaagccactcctacggaacacaccgcctgttcacactccaaaagagccagaaacaggcgttccctttttgctgcggtcaactgcttggaatcgttcaaaccggttaactcctccgccagaacaggcaaaataacggcgccggctaccacgggaccggccaacggcccgcgcccggcctcatccactccagccacgcaaagaaaaccggaggcccgggcctccatctcaaaactcatatccggatgcggtttttccttcatggcgctattcctcctcctgttcctccggaaggcgggccagcagaatctgcgtgattctcctgccgtcagaccccgtcaccacagcccggtagcggccaatccgcaattcctccccttcttccggaatataacccatccggctgattacgtaaccgcccagcgtagtaacgcccggacaatccaaatccatttcaggcaggtaatctgccaggtcaaacagggtaatagccccattgacggcatatgtatccttgccggttttcacaaactcccgcatttcctcctggtcaaattcatcctgaatgtcatcccccacaatctgttccagcacatcatccaggaataccaggccgatagaatcaccgaattcatccactaccagggcaaagtgggcatgttctttcagaaagaacgtgagaaggctgtccaggggcatcgtatccggcaccacgcgcaattcacgccgcacgctcctcagatccggattttcccgtcctaccagtttgagcagatctttgacatgcacccagcctttcacttcatccaggtggtctccctccaccagcggaaaccgggtgtggcgggatttccgggcaagctcccagttttcctcaaagggagccgtcaaatccatcacatccacttcagagcgcggggtcattacgtccttgacgcacatatcgttcagttcaagggcatttttggaaatttcagcctcctgcttcgtcagctcgcgggaacgttcgctttcttccaccaaatacatcaattcatccgtgctgtgcaccgtgcacgccgtggaacgggggtctatgcccagcaggtatttcagcacaaaccgcgccattccgcccgtcaggccaagaatacccgtatatctgaacaccgtataaaagaaatacagcaggggaaccgtcgccagggcggccttgtccggctggcgcatcgccatagccttggggataaactccccaaataccacctggcagcaggcaaagaaaataaatgtaacggccagagcgattccgtaaacggaaaccatgcctcccaatcccagggagaccagaaagggagctgtcagttccgatacaaaaaacgttcccaggaatcccaacgccagggaagaaagcgtaatgcccgcctggcaggcggccaaataaagatcaggatgcttggcagccttccgcgcccgggccagttttttccgggttcgggccggaacaccttccccggcgtgcagctggctttcacgaaccttcatcaaggcgaactcgcctgccgcaaaaaacgcattcaacaacaaaaaaaggataaagccggcaactgccagcatcatcccacccagcgccgggcctgcaccgggcgcttcagcggccccgaaggccgcaagaatactcagaggatccggatcattcattctgattcaaataatatattcggagaagaaggcagagatattgcccggcactttgtcatcacagtttttcataaacgcccttgtcccggcgctccagcacggtgaatccggcagccttggcgtctgaaacggaaagaggcttggtcacctccggcacattaatgcggctgatgaccttacgcacgggatgcttgcacaccaggcatttttcaagcggagcacggtccacgggacgcctcaactcaaaaccgcggcggcacaccggacaggactgtccggggtcgtcagggttttcagaaatatactcgtatatgggcatagcaaaacgctaggctaaataaaaatcagcctagcgtcaaaatctttataaggctgcaaccttttcctgtccttaccagctggacttggtcacaccgggaatcataccggcattggccagttcacggaaggaaatacgggaaagcttgaaacggcggataaatgcacggcggcggccagaaacaaggcagcggttgaccgtacgggtcgggcttgcattgcggggcagcatggttaaaccgatataatccttctcagccttcaattgcgcacgcagttctgcatagcgcttgacggtttcagccttttttttgtctcttgcgatccagctcttcttagccataagttcggcggaataagtagagggacggggatgaaaaatcaagcgctttttttcgattttatcaaattcaagccgttttcaatgtcatccgacctttccggcggtctttgcgcatggaattgaatacctgtttctttcacaaacatattgcgtgaggaggcatccggaacattcgcaacaggatggaagaagctaatttatttaactcttcctaaccattatctccaacaccccaggaaacatatttgaaagaagttcatgcaaaataccccgctcccagggctcggaggacattttctgaaaatttttctagaaatattccggcatgaaaacggcgatcgggcagggaagctccgtcgtaaaaaacggcccttatctccgtccctgcagtaaatattgaagaaaaaagacatggggagttctgcctacacgcaccgcctgtttcagatccattgcgcaatcaaattcatcatcagggaggacaggaccgggaactgcaccatttacgcagactggcggcggaaccgttcaccggacaggcttcagctgggaatttccgtgagagtatgcaaaaagaacgcaagatatggctatctttatataggaaagcggctgtttcactcctgttccggatgatggccgaagattgccggattcatgaacggaaaccggaaagggccgacattttcagcattttgtacggagtaccattttccaatgggttccggtaaaaatcccgagtaaattccggaaaaagctgtggaagaaatgagcgttgctttccccggtaaggccggttcatctccgcttggaaccgtttcatcaaagcagtctccggcggctccgggaaaaagcccgcggcgaaacatgattttgtcctttcctccggggggggaatggggcatcatgccgccgcacactaatcattgacgtacatgaaaatcgtagttgcatactctggcggccttgacacctccgttcttctgaagtggctcaaggaaaaatataatgccgaaatcatcgcctactgcgcagacgtaggccaggcggaagaactggacggactggaagccaaagccctggcgacgggcgcctccaagtgcttcatcggcgacctcaaggaagacttcgccaccaactacatcttcccgatgatgcaggccaatgccctttacgaaggccgctacctgctgggaacctccatcgcccgcccctgcatttccaaagacatggtggatctggccatccgggaaggcgcggacgccatcgcccacggcgccaccggcaaggggaacgaccaggtacgctttgaactggccgtcaatgccctggccccgaacatcaaggtcatcgccccgtggcgcgatcccgaattccgccagcagttcccgggccgcacggaaatgatcgcctacgcggaatcccacggcatcccgatccggcagtctctgaaaaagccttattccatggaccgcaacctgcttcacatttcctttgaagccgggatgctggaagatacctggtacgacggcaccacccccgccgaccgtgaaatgtacaagctttccgtttccccggaagacgctccagaccaggccgaatacatccagctcctgtatgaaaagggcaatgtcatcggcatccagtacgatggtctcgacgttctgctgaaagaactgggcgtcaccccgaaaggagaacgcgacgggtataccctgctcagccccctgggcgtcatgtacgtgctgaacgccctgggcggcaagcatggcatcggccgcgtggatatcgtagaaaaccgctttgtgggcatgaagagccgcggcatttatgaaactcccggcggcaccatcctgctggcggcccaccgcgatattgaaacaattacaattgaccgggaagtgcaaaaggtgcgcgactccctcatcccggaatacgctacgctggtttacaacggcttctggtttgcaccggaacgcgaggccatccaggccctggtaaccaaatcccaagaaaccgtcaacggggaagtacgcctgaagctttacaagggcaacgtcatgtacgccggacgccgttccccgcagtccctgtattccgaagaaatcgccacgatggaaggcggccacgaggaactgtacaaccaaaacgacgcggaagggttcatccacctcaacggattgcgcctgaagcaattcagccgtgtcaacaaaccctacggtaattaagcgcccgtaacggtaccactctttatcaaaccgtccggaaaaggtattccggacggttttttctttgcaataaccttttcttttcctgcgtagtgaccgttatgggatttctttcacacgcatttctggcggctgcattttcgctctctccgtttttggcatccgccgcggccttcaaacccaatatcatttttatttacgcggatgacctgggcatgggcatactgggctgctatggccaggaaatcgtgaaaacacccaatatcgaccgcctggccagccagggcatcatgttcacccggtgctacagcagccaatattgctgcccggcgcgcgcttccctgcttatgggcgtgcacgacagccactcccattcctacacccagacggcgggagccctggtcatcacggcggaacggaaaggctggtccaatgagcaactggaagagaaagcggcacgggcagcacgcatcaaggccgccgagggagaagtgttcctcccggaattgctgaaaaaggccggatacgtcacgggacagttcggcaagctggaatggggattcaccacctggcacggagaattgaaaagacacggctgggaccgctatgtagggtacatggaccatcaaagggcccatggcttttatccctccttcctctggaaagacggcgaacgcctccccctgaaaggcaacacccacgccgacggaggcaaaaccccggaagactacagtccgggagccacagaaaaacgaagaggcaacagggaaggtaaagtcacctacgctccggacgtaatgctggcggaaacccttcgtttcatggaggaaaaccggaacaagcccatgttcatctttttttccaccaaccttccccacggcccggtagatattcctccggaagaaaacacgtacgcgggctccccctccatccgtcaggcctatggcaatgccagcggaactaacagggaatgcgccggagcggcagaagaatacgcttccatggtggacaagctggacaggcaggtcggagccatcgtggaccaggtgcgcaagctggacctggacaagcgcaccattatcattttcagttccgacaacgggcatgaactttactaccgtacggataaaggccgcggccgcgggcccggctgccacggaggcgtcttggacggcaccggggaactgctggatgttttccgcggcagccgcggccgcgttgggccaaacaacgccatggccaatctggccggactgaaatggaccagccatgaaggaggcatccgcgttcccctcatcatttcctggcccggcacactgccctatgggaaggtctgccacagcctggtggctaattacgaccatatggcctctttcgccgatcttgcgggggtccgcatgccggaaggtaaagatgccgtttcctatatagatatactgtccggcaactccgccaggcagcgcgattatgtggtcgtggatcacaccgtcatcacgggggacggctggaagcttacgcaaaaacaaaataaaccgttcctctttcaaataggcaaggaccctgaagaaagacataatcttgcggaaacaaggaaagaccagctggaaaaactccgggccatttacaggaaggaagtgggcagccccagaaaagacaggtgaaatccggagctggcccggcatccccctttttccgccgggcgtttttgcaggttgaaacctgaacgttccgcatgtagagttccccggtgaagaacaatcccccctccccccgccagacagcactgaattgcctgaggagctggcatgcaggccgctccttcgcggaaaccctcgtggaccgggaatgttcacgaaccgcgcttccatcggcagacaggcacctggtgcaggctttggtcttcagcgtattgcgcaaccagacctggctggaccacgtcatcggaaccctccggaaaggcaggctggacgtggaagcgcgtcttattctccaactggggttgagccagctttttctgctgggcatggcggaccacgccgctgtgtatgaaaccgtgaatctcgcgtccgtacgcctgagaggactggtaaacgctatcctgcgcaacgctttgcggcgggagaaaaccattctggaggaacgggaaaaacttccgctttccattcattattccacccccgcgtggctggtacggagatggacggaacaaatggggccgcaaatgacccgcgacctgctccgctggaacaataccacgccgcgcctgtatgtgcgcgccaatcctctgatgcccatgaaaaatattccggcctccctcgccccgctggaccgcgcgcccggctggttctccgtggaaggccttctgccgctggaggaaattaaaacaggctccctttacgtagcggatccttccacccgttattccattgatttgctggccccacagcccggagaggaaattctggacgcctgcgccgcccccggcggcaaatccgccgccatcatcgccgctaccggaggcaaagcccacctgaccgccacggatctccacgaacaccggctgcccaccctgaaggaaaacctggacaggcagggttcttccttcgtcaggacggcgcaggcggactggtcccttccctgccgcacggaatggaagggccactttgacgccgtgcttctggacgttccctgttccaacaccggagttatccaacgccgcgtggacgtgcgctggcgcctgactccggaggaaatccgccgcctggccgcactccagaagaccatcctggaaaatgcctcccgcgccgtcaaaccgggcggcagactggtttattccacctgttccattgacgcggaggaagacggactgctggtcagggactttctgcagaaccatccggaatggacgctgaaagaagaaaaacttatccttccccacgaggaaaaatcggacggcgcgtatgcggcccttttgatctgtgcttgacctcagcttcaatttgtcaacaatgcgtgttcctgattaatatcattccattatgtcccgcaaacccatcattgccgccaactggaagatgaacatcggccccgccgaaggcgcccagttcatcgaaagcttcaaaaacctcattaaggggaaagacgtcgcgtgtgacgtggtcatcatccctcccttcaccaccattccctccgtgcagaacgctctgggcggttgctcctgcatcgccgccggagcccagaacgtctcccagtacgacaacggagcctataccggtgaaatctccaccagcatgctgaatgaactgaacctcaagtatgtggtgctcggccacagcgaacgccgccaatatttcggagaaacggatgccatcatcaactccaaaatcaagaaggccatcgccgcaggcatcacccccattttctgcatcggagaaacgaaggacgaacgcctggggggcattttggaacccgtgctggaaatccagctcaagggcggcctcaaggatctcaccccggaggaggtatccaacctggtcatcgcctatgaacccgtctgggccattggcaccggcctgaccgcaacttccaaggaagcccaggaagcccattcctttatccgcaaggttatttccgacgtcttcggagcagacgccgccgccaaggtgcgcatccagtacggcggctccgtaaaaccggaaaacgtggaagaactcatggcccagccggacattgacggggctctggttggcggcgcttccctgaagccggaatccttcgctgctctggtaacttccgccaaataagcgaaatccggcgccaccctttctacaggctggtccttcacgggaccggcctttttcatctccggagcaccggcctcgctcttttcacccaagagcgcagtttctgccttttcaagcagcctaaatcgtgcataatggcgggaaatcatgaaaaaccgcttacttaccccacgcagcaaaggtttcacgctcattgaagttctcgtagtcatcgccatcattgccctgctggcaggcgtctcctacagcatttattctcatgccacggaaacggcagccagaacgcgctgtacggacaacctgcgccgcattagcgactggggcaaggaattcgcaggccagaacggcggaaaactgccctccagcggcatgaaagacagcctcctgagcgccagggaatgccggaactggtgggacgccctggcgcccatcgttaatgcggaacaacccgacctgatcgcccggaacgccaaggaacccaacatgctcccggacacgttccgctgcaaaaacgacaagcgtccggaaatccttggagcggaggatgccaaccttcccgccgggccggacaccatttcctacaccagctggctggacaaccggaaggggcgacccatgaatgtggcgcgcggccaggccctgcggggcaaaccctggatcagcgacggcatcccgattgacgggcgcagcgtcatcacggaacaggattttgaggaaatcgtagtcccggcccttgaacgccaccagggaggaatcatggtgctttatgcggacgggaaaatatcccccgttgaggaccctacgcttaacaaagtcacccaaggttcctgaaccccttgtttctccgcccggcgcgggcgggaagctgccggaccattgccggcaatccagtggaattttcttcctactcccactgattcgcctttacgaaaccgggataatcattaaggttagcgtccagatgaaccagcatgctcccttcctgcatccgtacgatggaatgataccactgtctgtggcggggtatatcctgggaaccgttctgttgctggtccacctgtatgcgctggtaaaaaggcagcaggtgcaggcttttctgctggcgtctccgcgcaaccacctgctggctcagattctgctggccggcggcctgttctggttctttctgctggtggctcccgaaggattgggcgtgctgagccgctttcgggtggggctggcggaatttgaaggtatccgctggctgctccagctggcatgccccgtctttctggtgctgatggtcacgcaggtgaaaaacctgctctttccacgggcgctgggcatcttcggcctgatggtggcagctcccctgctcagtgccgccttccttcaggagccagtgaccaggctccttattcccatctggtgttacatcgtcattttcctttcgattctctggataggcaagccctacctgtaccgcgacatggtcaataaaatatgctccaaacctgcttggtggacgcctctttgcctgggaggaatggcctatggagccgccattctgctttgcgccatcctatggtggtaaggaggccgcctcttccggcaccgcttcatcacgcagaaaagacattcagccgcaggagaaggcctccggcaaaaacaggcatacgcaggacggatctttccggaacggcctgttttttcctcctgctgcaagaatcaatagcggttccgcttattatatatgatattccatattcctttcatgtgctctaccctgcgttcctccatcatgtccagcatagccttctggttgcttacccttgtcccttcactggcggacaggcctaatatcgtccttatcctggctgatgacatgggatggtccgacccgggctgctacggttcggaaatacccactcctgccctggataccctggccagacaggggatgctggcaacccggctctacaccgcttcccgctgttcaccctcccgggcctccatcatgaccggctgcgaacctcacaaggtggacgtagggctcctggatgacgacagcgggcgccccggctaccgcggacgcctgaacccgggtatccccaccctgccggaacttctgaaaaaagcgggataccgtacctatctttccgggaaatggcatcttggaaaagttcggggatcctacccatgggaccgcggctttgaccgttcccgcggtttgctgggtggagcggcagattactacaggcccatgccggacagacccttcggtgaaaacgggaaactgctccgtccggaggatctgccggaggatttctacatgacggacgatatcaccaaaacggctctggcctatattgacgatgccgtcaaaagcaggcagcccttcttcctttacgtggcttatacggctccgcatacacccctccaggccccccggagggaaatagaaaaaatgctcccgttctacaacggcaaatccccccatgccattgcttccaaaagactggaaaaacaaaagctgctgggaatcgtccctcctgccgccaaactgggcatggccggtaaattcaatccagaaggctatgaaaaaacttccgcaaagcggaaggattatattgccgaatgcatggccacctacgccgcccaaatcgttatcatggaccgcggcataggccgcattctcgcgtccctggaacgtcaccgcctcagtgacaataccatcgtcatgtttttatcagacaatggcgcaacagcggaaatgccccagaacaataaaaacaagaagactaccctccccacaggcccgctgggagaagtcggatgcagggacggatacggccccatgtgggcggctgtgtccaataccccttaccgccagtataaaatagaaacctttgacggagggctgtccgcccccttcatcattcgctacccttccaaaatacgtccgggatcgcgctaccactcgcctttcctgcttcaggacatcgccccaacctgccttgcgtgggccgctctcccaattccggcccatatggacggcaagccgctcaacacctactggaataatcctccggaacttcctccgtccaaggtgtgggacttcattcccaatacctgccctccccgcactatcttctgggaacatcagagaaaccgggcggccctgacaagtcaattcaagctggtggcccccaaccgcggcccctggcaggtgtacgacatcagggacaggacggaacagaacaatctggcatccaggcaccagatgcttgtagaacaattgtccgcgcagtacaggaaatgggcggcggaaaaccatgccgaatgacacagcacggcaggaaaacgggcatatgcgccctaaacgtttctatgggaatccccttccggaagaaaattctgatttccgtttcctcaagtaacgggaaacggcatgtgattcaccggaaaagaaaaagcagagaataacagttattcccgtccgcggcaacatttctgcctcccgggcattccgggaaccattcattattttcacactccttgccatcctttcccatgaaggggaattacataaaaatccgcttcttcattcggatgtttcctatgccctattttttgccctgtaatcaaaaataattcctttataaggttaaaactaggcaaaacaccgctgtttaccaaatcatttcccaaaaggaaaactcttcttttttcctaacaattattggaataaaagaatccttatcattcaaagaaataccgtattagaatacttctaaattagcaaaaaactcattgattgtaaataaacttaatttaaaatgccataagaaaaaacctttctgcaccttacctctgttctgcacagccatcacacctaaaatggaatatttttgataatcaattcataacacacctttaacaaaacttgcacagcgtctttttatgttcaaagagccctctttcctcaaaaaagcaaatctgttccagcctattctggttgtcgtgatctccatcatcggaggaactcccatggaaggagccaatacggggaaaatagtccttttgatcattctgggcgctgctttcattgtatggcatgtggaatgccagagactgctcaacaggaaccgggaaaccagggagcatgcctgcgccctgaaaaaccgcagtgcggctctttacaaaaaaacttacgccgccctgagcggagaatacgaaaacttcgccaataaactgaatggagaaagttgccgggagacaaaaacggacggttcaagggggacgacggaaagcttcaacggagcctgcctgttcctgtgttccaccattgccgctgcgctggctgaatataaaaactcccttgtctttgaagtgctttatattcaggcagagcggcggaaagaccaaaccttgctgcacgttacaggctacgcacagggagaacacaataacgacaccccttccctgctggcacagcctccgcggcccgtaacgaaaacacccgccatgctggatgaacaattattcgcggaacgccacctcagccccctggttctttccagcccggaagaagtgcagcgcagctttttccggaagcgcaaccagcctccggaggaaaaatacatgcagtatctggccattcccgtcctgagcaagagaaatgaaatcatcgggcttatcgaaatcgccgttaaaaagaatccgttcatttcgcccgtcaccatgctggaagcccatgaattagccgacgttaaatcatggctgtaccatttaaaggaccatttcctgttgtttcatgaaatagaacgcgccgtccgggatggattcccatgacggcagtacggacagaatagcctgctacgcccgacgccatatcccttaaaaatttcctgggatatatatattccggcctatttacaatcaactacttccatctttttaaccagaacggttaccgccatataatgctattaacctgtaagtgaaacagatagcacttgggccattttctgcatctgaaacaagaaagagaaaaccctgtaaactattgagtccacagggtttcaaaaaaggaatggtacttggaccgggactcgaacccgggaccaatagattaaaagtctactgctctaccaactgagctacccaagcacttacccttgctggaagggcgcaagcagtaaacaccacaccccctttcatggcaagcgtaaaatggaagatgaacaaaaaaagatcaggattccatgcattccagccatctcgcacgccattcggcaggaatacgcacagggcgcccctgcggcatctggaccagggccagctgctgatgagccctgaccagaagatcattattggaagcgcgcctcatttcaaaatcgcaccagaagcgggcccggtccacggattgaagccaccccgtcgtcaaaatggtgtctcccagaacagccggacgcacatagtcaatctcatggcgcaccaccacggcaaactgctgcaaatcgctcatggttttgtaatccatccccaatttagcgccaagtttggtacggcaggcctcaatcatgcgcaaataggccaggttatgaaccaccccgccgcagtccgtatcataaaacatgacttcatcttccgtatgaaacatcagctccggattcatgcctgccattgtaaaaaggaaacaggcgggctgaaagaaaattccggttcagccgcgccatgcatgatgcgtccgcgccagcgtcagcacgcagacggaagcagccccggagcggaggagcagacgggcgcaggagtctgccgtggctccggtcgtaaaaacatcatccaccagcagcacatccctgcccctgacggggctgcgtttcatccttttttcatccgccgcataaattttacgggcatgtctgagccgctgctcccgcgacaagctggcctggggaagcgtatccggcaggcgtttcagcacgccggcatacggccagcccagttcctctcccagcagaaccgccagttcctgcgcctggttgtacccccttcgagcctgtttgccgcggtgcatgggcacgggaacgatcaggcgtttttttccgccgaaccagtgaggatttccaagcactgcctctgccatcatctgcgcgaaggagccggccagatgaacggctcccccatatttgaaagccagcagaagatcccgcaatgatcccatattcacatacacggcacgggcttcctcaaaagaggggagagccgccgcgcagcgacggcataatccggacgggatgaaggaaccctccgccggttccccgcagacggcacagaagggaggctcgacaggcacgaaacttccgcggcagtccgggcaaacatggcagccatccaggccgccgcggccgcataactcgcagacaaaaggatacacccaggaaagccattccctggcaaccgccctcagcattccccgcacggcagaaagttgaaagaggctcctatcgtccgcccttcccatcgggggaatcggcgtcctcctcttccggcatctcttccagaagcttgtctatggtttcaatgaaacgccacgggcaccgcttgcgctggtatttacgccacagcacatcacgcagggttacccagtgcgcccgcgttaattccacgtgttcccattccacatcgtcacgttccgcacggcccaccttgggggcgcactccagcttccatttgccggcatggtggcatgccctgtacaccagggttccctcttccgtgcgttctttccacgtgtgaacttccatggaggcgagtgtaaggaagaagcgtttcgggtaaagaggaattttttctagtcatccgcccttgcgcgattagtatggctccgtcatgaacgacactgaaatgatcgaatgccgcgagcctgcccttcaaatgcagcgcctcatcgccatcatgaaacgtctgcgcgcgccccacggctgcccctgggacgcggagcaaacgcaccattccctgatttccaatatgatcgaggaagcctatgaagtcgtggacaccattcagcggaatgactggacgcagctgagggaagaattgggcgatgttttgcttcaagtggtttttcatgcggagattgcccaggaagcagggcgtttcgatttcaatgacgtggctgcggaagtaagcgaaaaactcgtccgccgccatccccacgtatttgcccagtccaaggcggacacaacggatgccgtattagctcagtgggacaagatcaaacgccgggaaaagggggcggaaacaaccccatacctgcatggaacaggcaaggggctgccgcccatgctccaggcatggaagctccagaaaaaagccgccaaagtaggatttgactgggcggacgcccaaggcgcccttgacaaggtgaaggaagaaaccgcggaatgcggggaaattctttccgcaccggaggaagacccccgcgtcgcggaagaattgggggatcttctgttttccgtagtcaacctgtgcaggaaaaaaggaatcgacccggaaacggccatggccggagcaaacagaaaatttgagcggcgtttcaacgaaatggaacggctgcttgccaaagacggtctttccctggaagaagcttctgcggaggccatggaggcacgctggcagcaggcaaaatccgcccggtaacggaatccggggtcaggccatcatgtccatgttcgggtctttccaggccggatcatatcccttggcatagctgaacacatgcttgtgcatgtattcgaagtactgctctttctgcatgggggtgagccgttcccagatggctacattcaaggcacggcataccttctgcatcattttcagggtaagctggcgcccctgccgggctttttggacctgcttgtgggtaagctgctccggagaaatttccaccaggtcgtgattggtcaggtgccagcgcttcatcagttcatccaaaggctgttctccgtggttgcgtccggttgctgtggcttcctcgtccatacgccttccttcgtgccctatttccgggaaataggcaatacatgattgccccatcagcactttttttgcatttccagttgcccggcgtccggatacatggttcaatcccgctccgttgcaataagatgattagcgagaaagaggaattactggaatggcgcaaacgcgccgccgcacagcccgcgggacgggtagtcctggatctggaggcagacagcctgcaccgctatcaggaaaaaatctgcctgatccaatatgcggacgaaacgggttcctgcctgattgaccctctctccatcgaagacatggggcctttctacaactggctgaaagaaacggaagtctggatgcacggagcggactacgatatgagcctctttcaaaacgcctgggaaacgctgcccgccatgatctgggatacgcagacggcggcgcgcctgctgggcttccgccagttcgggctggcagccctggtggaacacttccacggcatcaccctgagcaaatcttcccaaaaggcggactgggcgcggcgccccctttccccaaccatggtcacctacgccctgaacgacgtaaattacatgctggacatggcggacaaactgacggccgccctccgggaaaaaggacgcatgggctggtttgaagaaatttgcagacattccatggaacgcgcccgggaacgccatctggcaggccatcaggacccctggcgcatccagggctgcggcaaattgaacaggaaggggctggccgccctccgggaaatgtggacctggcgtgatgcggaagccaaaacgtgggacaaacccgcgttcatggtttgctccaatgccgacctcatccagtggagcgtggctctccaggaacagcgcaccgtggcgcccccgccccgttttcatgcccacaggcgcagccggttcatgaatgcgctccagaaattctacctgctggatgaagaagactacccatgccggccccgcattcagcgccggcagcattccgaccaatttgaggacaatctggcccgcctgtgcaaactcagggatgaaaaagctgaagagctgggcatggaaggctccttcctgattacccgggcctctctggaagctattgcggaagacagggaaaaaggcgtttccaccctgttgaactggcagaaggaagccctgggtttttaaacggtcctttctgcaaaggaaaaacatccggacggaagcaccatggcccggaaagtcctttgtccccctctttccccattcacccagcatcatcgcccattcatcccggacggccaacacaagctttctccctgaacattcccggctttctggaagcattctccgctcagggcagacaggaacaaaaatcttcccccgcaaacgccgtcttcccctgcctgtctatttacattgagcggaagacagttttttctataatgcagggcagttcccttcctccatgccctccaaccgccattcatacatggtcctggcaatcttctgcgtctgcgcccttgccatatgcgccttcctttcctggcggaaccaggagaaaaaagaccggctgtcgcggcagtacgcggaattttccatgccgcagacctcgaagggaagcacgccgacacaacagaaagccctgcttgaaatactcagcaaagaacagaaaaatatttctcagactttcccgcaccgtcaacaggcggcagaaccgccgccccggagccgagaaaaaatcttcccccccccggcagggcatgctagggtggcaggcgatgaatcatgccgatttagaccagttgctgatccttcaggaaaaggatgtgcggatttccaaactccggaaggagctggcttccctgccggaacagagaacgcgcctgctgaagcagatggaggccatcaagcagaaggccctggccgccaaacaggaagtggcaggcattgaaaaaagcatacgggacgtggaggccgccgttgaaaccaaacgcgcctacatcggcaaaatgaaaacccttcagtccaacacccggaaaaacgaggaataccagatgtgcatccaagaggtggaaaaaacggaagccgctattgactctctggaaacctcagagctggaattgatggagcgcctggaaacagcaaaaacggacatggagcagaaaatccgccgtgtacgggacgcccagcgcgaactggaggaaacgctcgcgcgctttgaccggacggcagagacggacaaggagctcctgaaccgcttgaatgcggaacgcgcggatctggccgccgccgttccggaagattccctgggggaatatgaacggatgaccagaagcaagggggttccggtcattgtgccaatggatgaaaaaggccattgcggcggctgccacatggttatcacggacaacgcccgcatgaaagtgctgggcggccacgagaccgtttactgcgacagctgccaccgcatcctccactaaagaagtttccaggaacgccgccgggcttgccatgaaatccagatcggaagaatttgaagagtgggggacggaagtcatcttcggccgtgccaagggattccgcgccgccatgatgcgtatgatcctgcgcggcgcctcctggctgttcaggctggtggttctggcacggctgtatctgtttcattccagcatcgccaggcaggccaggctgggaacgctggtggtcagcgtgggcaacatcaccgtgggaggaaccggaaaaaccccggtggtggaactgctggcccgcacccttacccggcgcggacgcaaagtagccatcctgacacgcggctacaagagcgcagaactggataaacctcaggaatggagggacaaggacggcaggctgccggaaaatcttcccaaaatcgccagcgacgggaaaacgcgctacctgggccccctgcattccggagatgaacctttcatgctcgccaaaaatctggacggcgtggcggtgctggtggataaaaaccgcatcaagtccggcatcttcgccattgagcacctggggtgcgacaccctgttgctggacgacggcatgcaatatttgaaactggcgcatgaactggatatcgtgctggtggattgcggcgcgccctttggcaccggagccatgctcccgcgcggcaccctgcgggaacccaggagcagtctggcgcgcgccagttacatcattctgaccaaatgcggcggaaagccacaggatgagctgatctccgccatcaggaagtacaatcccgtggcggacatcatcgtgagcgaccacggcccccggtatctggaaaatgtgttcacgggggaacgccttcctctggaggccctccgggggaaatgggtggcgtgcctcagcggcatcgcacgtccggaaagttttgaaaactccctgcgctccctgggcgcccacgtggaaatctgccgcaggtttccggaccaccactggtttgaacaaacggaattgcaggaattttacgaccgctgcgcagaccgggccatggacatgatcgtaactacggagaaggatgccgtgcggctggaaaaaccggaggaaaaaccggaggtccctatctatttcctgcgcattgaggtggaaatttaccagggccgggaggcatgggaacgttgtgtagaccgcatctgcggaatttcagaaccgcgcccgcgggacgaatggatgccttcctcgtctttctgagcgagaacgcagcagcttaaggcaatacatcaagaaaattgtgaacatgcgttgcactttctcttgaagagaaatatttaaaaatacgccgtcttttatttttttaactctttatttaaaatattcctgaaatgagtatcataaagttaaaaccattcatcacagtggccggcatcatgcttttgctcgcggctgctgcaatgggttatttctccgctcaaaggctgtcttccatcattccggcgtccggttatgaagataaaggcgtttattccttcgtacctgttcgggtgcttcccgttcaggtggaaaataccggtgccaccggaagagcccgccgcatgaaccccaccaaaaccgtttacgtggttcactaccgtgataccagcaaaaaaggctatcagtggaaattccaggcagctacccgcgaaacgggacaaaaaatcgtgaatcagagaattgccgtagagcggcgggtgctgagcatacctgccgacaagcattcctatatcaccatagaatcggaagagactgcagaaagctatacagcaaaacttcagcaaaagaatataatgattctggccttctcaggaatctacattctgctctatgcagcgacatggagcgttattcttatgaaaaggtccaggaaagagtctcccgcggcctgaaaagaaaaaggcagtttccccgaaaatgcgtctttatgccctcctgacaggaacgcggcagaactttgacggcgaacggcatgaagccaatcgcatatttactggaatccccggcgggtatgtcactccgtaagtgaagaatcccgctctttcattgtctctgttcacattttgccacagccgcctgcatgcggaaagaatgacatttcccgagaggctgcggaaatccgccgcttttatgcagagaaggccgcttgacttgcccggaaaatcgtgtgaaacaaaaaggcagtatcttcccatgaaggcatttaccatcacctccattctggctgctgcgtgcctatttccgtcctattcgccggccggaactgcagcagaaaacaagattcaggctgccccaatgcaaacggcgacaggcattcccaagcaggacccccagcttatcaaagggaagctcgccaacggcctgacctacttcatccgcccgaatgcggaacccaagggccggttcagcatccgcctgcgcgtcaacacgggttccctgaatgaaacggatgacatccagggcgtttcccacttcctggaacacatggttttcaacggaagcacccatttcaagcgcggggaaatgattcccgccatgcagaaagaaggcctgggcctgggaggggacgcaaatgcgtacaccgcctttgacgaaaccgtgtacatgatggacgtgcccagcatgaaggaatccaccgtggacctggctttcaccatcatgcgggattttgcggacggagccctgctggaagaaagcgccattgacgcggaacgcggcatcatcaccagcgaatacaaggtgcgcgactccgccggctaccgggtcatgaaggaagtcttctccatcatgctggacggaacccgcattcccgaccgctatcccatcggcacgctggaagtaatccgcaccgcgccgcgggaaaaatttatcaactattatcggacccactacgttcccagccaaatgcagctcgtcatcgccggggacatcacaccggaacagggaaaagcctgggtggaaaagtattttggctccatgaagaaggacaactattccttccagacagaccggggcacgcttaaaacggctacggaaaccaccgcccactggattaccaacaaagaggccaccagcacggaagccagcatcaacatcgcccggccctatgtgaaaaagccggataccgtcgccaaccgcaacaaagatatccccttgaacgtggcttacgccatgctgaaccgccgtctggaaaagatggcgaagaatgcggactgcccctttatctccgcggaaggaggccgcatggacatagtggaagcggcggaagtggactccattcagacccaggcggactacaagaattggaaaccggctctggccgccattgaacaggaactgcgccgggccatcgaattcggcttcaacagggaagaactggcggaggcccgtagcaacattaccgccgccgcggaaaacgccatcaagtcctgggccaccgccaagtcggaagacctggcttccgccatcgcccagagcgccgcacgggacaaggtcttcaccacgccgcaggaagactgggccatctccagggaagtcgtggaaaacctgacgcccgaacaatgccaggcagccctgaaggaagcttggaccggagcctttccccgcgtgatcgtcacttccaataaggaaaacccccagggaagcgccgaaatcatgaacgcgtaccgggaatcccagaccgctaaagtacagccctaccaggcggacagccgcaaggatttttcctataagttcggggatcccggcaaggtgacggcccgtacggaaaccaccgacctgggagtcacccagctcaccctgtccaacggcgtgcgcgtcaacctgaagcccacggaatttgacaaggactccatcaacatcacctttgccgtggacggcggggaactgagcaggccggaaaaagcctccgggctggaactttttgcgaatgccgtcatgaacggcggcggtttgaaagaccactccaatgacgaactggccgccatcatggcaggcaagaaggtaggggtaggcttctccatgacggaccgcttcttcctgctttccggaaacaccaacagggaagacctggaaacgcaactccagctccagacggcctacctgatgcaccccggttaccgccaggacggcgttaccctgctccggagggccattcccatgatttataacaagatggaccatgaagtgcagggagccatgaagaagcaggttccggccatcctttacaggaacaatccccggttcaccttccccacccaggaacagcttacctcctaccaggtcaaggacgtgcgggactgggtggatgccccgttgaaaaacaactacatggaagtgaccgttacgggagacttcaggacggaagacatcatccccctgctggaacgcaccgtaggcgcggttcccaaacgtgcggaagctccggcaacgctggatgaaacgcttcgccatccggccatggcggacttcaatttctccaaggacctgacctatgactcctccattgataaaacgatggtctgccttttctggaaaacgcccggcggagaaaataaaaagctggcccgcaggctgaatatgctcaaggccgtcttctatgaccgcgtattcaagggcctgcgcgaagacatgggggaaacctactccccttccaccggcctcaatatcagtgaaacctatccggacggcggctacatcatcacgatgagttccggcgtcatgcgcaataaggaggccgtgcgcagcgccatcgccagaattgcggacgacctcggcaagggaaatatcacccaggaagaactggaccgtgcccgcaatcccattcttaactccatggaccgcgcccagcgcgacaacggttactggacatccctgctgaaagactcccaggccaagccggaacggctgaaccagcagagggaaagcattccggacgtaaaagccatcaccgtggaagaggtcaacaaacttgccaaagacatcttcggcaagggagagcatctcaatctgaacattctgccggatcacccggctgcggaaactccgcctgctgaaaagcaggcggacaaagccgactctccccaggccgccgtctccccggcggctttttgcgttcgcgccaccgtcgtgaagactgtaaaaaaagactccggcaagaatggatatgccatcatcatttccgaagaaacagcttcaatgccggcctggaaggccgtggcggacaaactggctgaaaaacacggaggctccatcgtcaccgtgaaagattccgtattctccaagctggacacgctcaaaaaaatggctccacgtttcatggccgtcgtcgcacgcccggaggaaatagaccgggtgctggtgaatgacctgcaccgcctgagccgccggctggacgatgacccttacggggactgtatctggggcattgtcacggggtacaccccgcaggccgccatgagaatagcctctgaaacgaagcctctcgtcatcagccgcgccatgggaactaccaacgtggattcctcccgattcaaagacagcatgagcatcacggactggcagcccttccaatacctggaacagcatggctccaagggcaaggtaacgccggctttctacacgaaaggcctgaaagaacaggacaagggggatgaaaccacgctgggcgtaacgcccaagcttatggaatactggaaacgttattccccgcagctcttcgtaacggcctcccacgcaacccagtttaatctggaaatgcccttcggcaagggcctcatcgtttccggcaacaaccggttctacgcgctggacaaaaaacagttcagggaattcaccacttttttgcgcggcgtgctcttcaacggaaaggaagacgacctgctctccttccttaatagaattaaagcgccggtgattgaaaccaggccggttccggcagtctgggtcgcggcggggaactgcttgatcggagatgccaagaagacgaaaaattccatggctgtcaccgccctgagccgctacggtttcaaccagctggtaggctacaccgtcccttcctggtatggcaagggcggctgggggacgctgggccttctgttcagcaaccatgacgcctccagcctggcggaagcctggtatttgaacaaccagttcattctggatgagaccatgacccgcttccccaagctcatggacgtccatttcaactccgcggatatcaatggaatcaagaatgatccggactttgccaggggtataaactccgccggatacggcatgggcaaggaccagctggggcttatccacgaccgggataccgtggccttttatggagaccctgcctggacggcgcgccttgacgaatcccgggctccgtccccatggcacatcgactggaatgacccggcagatgcttccaaagggttcaccgtcacagccaacaaagacgccaaaggtcgcctgggagtctggttccccaatcggatcaacgccggcaaggccaccgtcaccatcggcggaaccgccactcccattgacaaggcaggcctgctgaccaacgacttcctgctactccgggaactggaactcaaaaagggagaaaaagccgtcgtggaaatggaataagcgtggaagaaaaacaagttgcaggaatttttccccttccgtcggcggccgaatatccggccgccgctctttttccatagacaagcagcctccaaacatggatactcccggtaatcaatccaccctatgactgattactccattttctttatcatcgccgtagtagcgacgggcgtgggagcgctcctgtttctcctgtccctgttcgggctgggggaacatgatctggactttgatgcggattccggcggagcggacgtagggttgctgtccatcaaatccggcatcggcttttttctgggcttcggctggggcggcgtgctcgcccagggtctggactgggggatggccgcttccctggcggcggcttttttcaccggcgtgctgatgttcctgattatcggcatctccatgcgtttcattatgagccttaaatcagacggcaccctgaattatgaaaccctcaagggaatgaccggctccgtttacatcagcattcccggaaacctccaacgcggcggacaagttacaatcgcccatcccagccagctgctgtacctccctgccgtccaggaaggggaacatcccctgccctccggaaccccggtggaagtggtagccgtcactgcgggaatcgtcaccgtcaaacctcttcattaacaaacaccccaatcatcataccccaagccgactatggacaaaatcatccccatcgccattctggttctcttcatcattctgaccgcttcctggctgttcagccgctaccgcatgtgccctccggacaaaatcctcatcgtcttcgggaaagtaggcacaggccagccggccaaatgttaccacggcggctccaccttcgtgcttccggttctccagtcctatagctacctggatctgaaccctatcaatattgacgtgcccctccagggtgccctttcctcccagaacatacgcgtggatgtgccctcctccttcatcgtgggcatctccacccttcctgaaatcatgcagaacgccgctgcgcgcctgctgggccgctcccgggaggaaatccgcaacctggccgcggaaatcatcatggggcagatgcgcgtggtgattgcctccatgaccattgaggaaatcaattccgaccgcgaaaaactcatcaagggcatcacggaaggcgtggacgtggaactgcacaaagtgggcctccatctcatcaacgccaatatcacggacatccaggacgcttccggctacatcaacgccctgggcaaggaagccgctgcgcgcgccatcaatgacgccaccatcaaggtggcggaagaaacgcgccgcggggaaatcggcaaagcggaagcggaaaaggaccagaccatccaggtggcgaacgcccgcgccatcgccattgaaggccagaacgaagcccagattaaaattgcggaatccgccgccaagctgcaagtgaagcaggcggaggccaaaaagctggcggaagtggcccagaaggtgcaggaggctaaaaccctggaagaagcctaccaggcggaaaaagaagcggaattgaagcgcgcggaacgcgaacgcgccacgcaggaagccaacatcctggtaacggcccgcattgaaaagagccagcgcgaagtgcaggcccaggccacggcggaagtactcaaactggaacaggaaggcaaggcgcaggctctgctcatccagcgcagggcggaagcggaagccatccgccaactggcggaaggcgaagcccaggctaccctcctgaagaaaaaggcggaaggggaaggcatggaaatggtgggacgcggtgaagcggccgcgattgaagccgtgctggaaggcaaggcccgcggttttcagcagatcgtccaggcggcaggttcttccgaggccgcttccaacctgctggtgacggaacagcttaccaagattgtggagctccagtccggcgccattaaggggttgaaattcgacaaggtagtcgtcatgggcaatggagggaactcctctgtgggaggattcgtccagaatctggtaaaggatacgctgccccttcatgaactcggcaaaagcgtagggctggaattgcccgcttttctgggcaaacccatggaagggaaaaccgcagcttcctcccctgctcccgcagccgatgccccggcggcagataccgcaaccgccgccaacccgagttagccccttcatccccgccttcctgacggcaaccgcttccccccggatagacagggcagatctggacagcattgtccatattgacgcagggcgcatgctgcaatggcaaaatccgttccccgtcaacagggaaacggctcttgaaccataaagggaaaagcagaatgcctgccttcaaggctaataggcaaaggccggcaagtattgtgtccttccacctgcccggatgaacagaaaaatatcggcgctttctgctttattcccggtaatatcgaaagcggcaagacaagcatgccctccccaggagggcggtaaacgccatgttgatttattatcctgcaactgatgttttcatgatatttttcaatctgtaatgaaatgcagacttcttatggcaaatagcgttattattcgataatacaattattctatggcataatataacaaaaagctataacaaattactgcttgcaggttcattgacaagaaaccggaagcaggttaggatacggctttcaacctctcttcgactaatgaatatcaaatccgcccttttgacgctcgccgcagccctcgctctctcctcctgcaatacgatcagcggaataggaaaagacgtggaagccatgggaagcaagattgacagcgcctcccaggccaccagcaagtccatgcaataaggcccgggaagcgccggacgctgttttaagccctcttttaatggaaaagaggcagtactttgcttcctgccattctgccctgaatggcagtcatccccatgggattcccaacgaattggcaaggtccggctccatcctgcatggaacacgccaaacctttgcggccacccggaaatcagggcatgcgggcggcagcacattttttaccggaaagccgcttcatccgggtggatgaagcggctttcgtccaaggtctctacatgacctttttacatggcccggctagtggaacgggcggcggaattaatgtcgctgccgaccgcttccacatccttgcccaccccgcctatcgtattgcaggaaacgcaccccagaagggtggcgatactcagaataatcaatttgcttttcatcgttttattggaagagttccgagtaatcagactctattcctccgccccccgttcaaagaaccggcaatcatgccacaaagccccctgtcattctccgttcttgccatgcgttcccaaaacacttaaaaaacatgcgccaaaggaaaaaaatgccgggcggacattccgccccattaggaaccattactatttactaccaagatgattaaagtagccatcgtaggatacggcaacatcgggaaatacgctgtggacgccttgcgcgccgctcccgatatggaactggcaggtatcgtgcgccgccccggcagcgaagctgtacacggcatcaagaccgtaagcgacgtggaggaactgggccatgtggacgcggccctgctctgcacccccacccgcagcgtggaagaaacggctctgcccctgctcgcccgcggcatcaacacagttgacagcttcgatattcacggggacatcgtggccctgcgccgttccctgggagcccaggcaatcaagcatgacgccgtctccatcatttccgccggctgggatcccggaacggactccgtcatccgtaccctgatgctggccatggctcccaaaggcatcacgtacaccaacttcggccccggcatgagcatgggccacagcgtcgtggcgcgttccaaggaaggagtggcggacgctctttccctcaccatccccacgggttccggcgtacaccgccgcatggtttatgtggtgctgaaagaaggcgccaaattctccgacgtggaattcgccattaaatccgattcctacttcagccatgacgacacccgcgtgctgcaggtgcccgacatcgacgtgctgaaagacatgggccacggcgtgctgatggaacgcaagggcgtttccggctccacgcagaaccagatgttcacatttgaaatgcgcatcaacaatccggccctgaccgcccaggtcatggtggcttccgcccgcgccagcatgaaactggccgcaggctgctatacgctgccggaaattgccccgatggattttctgccgggcgaccgcgaagaattgattgcccagctggtctaacccggagcattccggacacacggaaccaggggcgcccctgccgcccctgttccgcggaccttcctttatcctccggttgaggaccggaggatttttattgctccacaacgacctgcctgccattgacggccttcacccgggccggagtacgggtccgttccgtccagtcccacgctcgggccatgtccgcccaaaaggcggcgtggggagaatccttttcctctgacaaacgcgccggagtgggcacgaagggataaatctgcacgggaacgtttttttgcccgtgaaccagagcttgttccaccatggtataaatctcctcaattccggaatcggtcatcgccagacagccgatggaaacatcccgtccatgcaccatgatgaagcttcccgtccggttcagggagcggtcataggtattcggatacccgatgttgaaagacaaatggcaattgctccggggattaagcccggacggttccacttcataaaaaccttccggtgtttgcctgtccccttccttctccttgggtcccagttttccggaccatgcggcaatcggatagcgcttggcaagcatgtagcattccgatttgtccggtttcacccacagttccaggacggagtcttcctttacggcccgtaaaaacacaggacttcccaccctggcgccgcacggctccagaaaggaattcagcacgggcgttacccgtttccgcgcgatatccgcacggttggaggatttttctgcacatgccatattgaaaaccgctacggcggaaaccagcagaaccagccccagcaaggacaggactacattcttcttcataaatcatctataatggcggcttttgttttgacaagcagaaaaccggccggttctctccgaagaaggaaaaggaaaaaacggcggaaaaagaagacggaaagaaaagcggttcctgagaaaggcgcccttcccgaagctgtccccggttagaagccatgtctgtgctggaaatgcaggctccggagaagtattatcggccctcagaacatcagcggaagaccgacctataaacgccatggaaataaacaaccttcttcccatcactacacggaaggaattaagaatatggctggaaaacaaccacctcacttcctcctgctgctgggttctcacaacgaggaaaccttccccacatgccctcctttacctggatgccgtggaggaagccctgtgcttcggatggattgacagcacccgcaagaagacggcctccggtttcctggcccagcgtctcactccccgatccagaaagagtaaatggtccgaactgaacaaggaacgcgtccgccgcctggccaggctgggactaatgacgccccacggcgaaaaatgtctgccggaaatgaatccggaagcgttccgtattgacccgtatattttacagctccttcaacaggatccgcttatttacgccaatttcctggcgtttccccggctatatcgccatgtgcgcctggacaccattcaaattaaaaaaaaccagccggaactgttccgcaagcgcctggaaaaatttctgaagaatacccgtgaaaacaggatgtacggagaatggcacgacggaggacggctgctggaaaagtagacgccaggctcccgccatttccctgccggacgagccctgacgttgccaggccgttccggaacttgtccggaacggcctggcaataatatcatgttccttcttgttagaagtcgtagcggtagccgacgcttccgttcagcgcgctggacccgtcacggatgtccgcgtccccgttcacgtagatggttcccttcgttcctacaggcacgctcagtccggctcccagctgcagcgccgtcgttcccactttcgcccccctcacgctttgcgcgaagccggggttgcccagcagagagacgttcgtttcccccctccggtctcccaggtcctgcgccgcgtttactcggatttccgccagcgcttctcgtccgaagatgttgctgcccaccaggcccatccaccggccgcccagcgccagcgtccccgtcgtccagtcctgcctgccgacgttcaggcccgcgttgcccgcacccgtttcctcatagccgtccatccgcgtcgtcaccaccgaggcgttgaacagcggctgcagcacgctgctacggttttcgttgaggtatacgtcgtaggtgagttcatacatcgctccaaagccccacccgctggtgcttccctgcgtcccgtagcttccttccccgtagttgaccgtacggttgagtttcgcgtcgttccatcctcccgtcaggatgagcgtgtgcgcccagcgcctgtcctggtaacggccgaagaggctggcgtagtagctgtccaggtgcccgtcggcgctgtccgccgcgccggccgtcaggtcgccgtagccggccgtgaaggccgctcccaccgtgaggcggtcgctgaggtccgcgtccacgcccacggtacctccccaggtggtgagctggtagccgctttcatccccgcgggtgtcgagcttggcgtaggagcccgtgccttccatccacatgtggaagcgggggaggtcgtcgttgacgtaggccgggttgacgcccatgagggtggtccggttcctgatccagcccatctggtcgcgcagggcgtccctctgtgccgtccccagcgcgttgaccgtgctccctgccgccgccgccagggaacgcctggcggcggaaggattattgagcatatcgttattgagggcgcccaggaaatccgtgatggcctggtctatgaaaccatgcctggcagcatcccaaagcagattggcgcccgccatggaattagccgtgtccgctacgccggcataaacgttatctgtctgttcttccgctttcagaaccaccttatctccttcctgcaccagatgggcattcttgtaataggtgaggaaaaggcctccgactgtcagcgtattttctcccaggtcaatcgttccgtcgccggtgagttccatcagcgtaagttccatcggattgcccgatttccaggtgatattgacatccgggattgaggtgacatggaaagaggcgccatcttcaatgacaacgtcgccggaggcctcaatgaagctggcggtcatgtcggcatcagtattcaaggtgaaggtggtggcggacccgctgctgaaggaagcgttctctacgctcagagtggtattgaccgccgtcagggagttgtcgctggcctgaatggtcaggttgccgctgttgaccagattgccgtaactgagacgggctccgtccacatccgccttgccctggagaaccagattccctccgctgattgtcagaccggtatccgcgccggagctgcgcaaaacctgcgttcccgctccggaaacatccagcgttccttctcccagcgttccttcatatgtatgcgtctggccggaagccgcctgaatttgcagagtctgcccattcagttccaaggaaccggagccgttcagtccgccggcagagccgtctgcctccagactcagggaaccgcccagatccagcaccacgccggaaagcgtactgtccgcagccagccccaaagaggcgccttccgcaatagccagcgtaccggttccggcaatttccgtatgggaaaggccgtcggtagcgcctgtcagcgtcaatgttccggaagaggcgatatccagctttccgccgttgtcgccgcctgccagcgtccgggccgtcgcgcggcctcctactccaatcaccgcaggggagtccgcatccgcggaattaagatgcagagcttccacgtcagccgtgccgttaagctgaagcgttccttcttccgcaatgatatccccggccagcgtcacattcccggacagggtgagtttgttcgctcccgttttgacgaggtccgtgttggccgcagcaccgttcaggccgctgatgtccccggcaaaagaggtatccactcccgtgctttcatggaagaggttgttttgaagttcgatacttcctttatcctccgtcgtattggtgacaatcaggttgcccgtgcccgtctggcccgggccagttcccggtgcggtcaggtttttgatcaccatggagccgtccgactggacataaaggtcctggtccacaatgacggcctggtagaaattgagggactggtccgtgaccggattatccgcgctgcccgtaccatccacggaagacacgtaaaccagatccgtatcaccggagaggacgatgctgcctccgttgacgcccacgatgccgaagcccagcgcagcaaaaagcgggttagccgtcatgtggctcttaagcgtttcaagatcctgtgcaaaaccgccattggtcagaagtatctccagatttccgcccgccgttttcatggcatccataacgctggtgaggtccagcgtaagcgtggagccgtctccaaaggagatgctgcccagattatcccccgtgccctcaaactgaatcagaaagtcctctcccgagaaggggtctccggaaatattgcccgctcccaccgcaagactgctgtccgtgccgttcaccgtccaggtggacccctgcttgagtccggtgagctgcgttccggcagaagcggtgacaactgaccccagcccggcggcatccagacctcccagggcaatattgccggaatcggcaaccgcattgacatggatcttgtttgtatccgttcccgcgtagcttccggcgttcgccagcgctccggactgaataaggatattagtggcggcggccgctccggaaaggtccagcgtgcccttggccagcgtcagcgtccccgtcaggccgttggcgcggtcccccactgcaaaagagccggaagtgctgaccgtaagactgcccgcaccggcaatggttccggcccaggcggcgttgtccccggttccgtcgcccagctggacagaggaattctgggcaatattcaactctcccgtggtcgtatttgccccggtaagaaccagcttgtcgcttccctgaacgctcagggaggccgtatcaatcacattcccggcataaagcaggttccctgccgtacccgtgtagttgacgcggtaggttccggttcctcccagggaaactgccttgatgaattcgcccgtattcagcgtggacgccgcaccgccgttgccaaaggaaaggatggcattcccacggccggaatgcaccgttcccgcaaaaccggtgagatcccccgtaaaaatggccgtcagagtcgggtcaccggccgccgttactcccaggttggcgtccgcctcgctcgtcaggcttcccgccaggaccagcgtctggttggaactgccgttcagccatcccccagcggccatcacatggatatcggcattaacgggatcggcggcggaattaacaaaaaagccgcgcccatccagttccaatctggcgctgccgattgcagcggcattggcaaagccgacttcattccacgcagcgttggtgccgttgcccgccagtctcatggtaccggtaaagccgctgttgtctccggtaacggaatagcggccgccgccggggaaggttcctccttccttcttcccgagaaccagcgttccggctccggtaatgcgccctgacagaatatccgtatttacggagttatgggcacggttgtcctgtatctggagagtcgcgttttcagcgatggaaatgtttccgctccaggttcgcgtaacgctgttgtctccgatgttatagaacagagtccctccgcttacggtgatggcgccggcaaaggttcctccttgtattgtattgatagtcagcatgccgtctccaagcttgacgatatccttgtctcccagttcctgggtgtatgtagcccaagacacatgattgccgttcgtattcactcggatggcatccgtgctggcggctgaattaatgagcccggaaatatcctgcgtggcccccgttccatatgtgaaggtgccccctccaaaaataatcttgttggccgctaccagccccagcgttccttccgtcgtgccgaccgtattcaacaccagttcccccccgttcagcgtcaccgtaccggtgcccagcccctggacggcattgaggttgagggtgccggccataatggtcgtgccgccggagaacgtatttgttccagtattttcaatggtcagcaccccctctccccgtttaatgagggacatcggatctgctccgtccacaagggcccctgttcccgtgaacgtgtaggccgtttctccattgttgaccgtaagacgcgcggaagaaacattcccttctatggtgacggcagaggcggatatgccagccagatcttcaaaattggcggatttggcggcgtcataaacgactgccgtcccgtctttgtccagccagacggcagaacctcctgccgccatccagatacccgcatttcctccgttccagttgagggcttctcccaacgccttgactcgcaggtaaagagtgtttccggacaactccagggcgtaggtataatcttcggaaaggccgctggaatcaaaagaaaaattgctggccgtcaacgtaccgaaactgcccgccgtaatcagcctgtagtcattttccatcgtctggtccaccccgctgatcgccagagtcagcgtgccttccgtattaaaggagagcgtgcctcccgactggacgatggcggagatggaggaattcagccccgtcaaatccagcgtcagaacggaagacggggaaagagtcatattgcccgcagaggtaagacgggctccggagcccatcgtaatggagttgccgaaggtcactccgccggcaagcccgaaactgagctccccagaggaaaccgtcagcacattcgcaaatccggtggaagaactgagcgtgagcttgcccgctccgctcttggtaaaagcactgcggccatccagcaccgttgcgttggcaataacggcatccgtcccttctccagcggaaatttcgtcaaacccggaaatggaggcgtttgtgaacatgtccgcgcgcgtcacgccgttcaggttcaacacgcttctggtaaccgtatccccccggccctggccggaaagagttgtcgttccggtaaaaatggcgtcattgcccgtaatggtcacgttggccaaagccgtagtcagggcagtgccattgaccttctggccgcccgcataaatggaagcattattgaacgtccctccgctgatggaaagattggcttccccaatcgtcaacgcggaactggtattgttgcgctccacataagtgcccagggatatttgagctccatcaaatgtgccgcccgtaattgttatattggtggaaccgatattcccggtaagggcggcggtagcggttccgttaatataggagccgccccagatttgtcccgtatatgtcccggacttgaaagtcaaattggtggaacctgtaatattcaacgtgctctcccccgtttccacccagcttccccccgcaatcatggccgccacggtgccgctgcccaagtccagcgtcatattggtatccgccaggttccaggcagacgtgcttaaacgggcgcccgcaaagattttcttggtcccgtctccggaaaaaacagctcccgtgatcgttgtcgtcacgccctgcgaaaataaactctgggcaaaagtccccccggtgatttctacggaagcggacgaatgctccgcaatatttgcggcagaatttgaggatgtcgcatcggacaggccatatacattcgcgttgtactggcctcccgtaatgctcaacctggccgtacaggcattcgttccatctcccaactgcacttggcctcttcccagaagggcgacggagccgttaaaagttcccccgtccagattcagggagacattgccgacgatggtcgatttctgccccgccccgcgtgtcgttccagccgttaccagctgggcgaaggttccgccgtcaatggtgaatgtcacatcccccgtgtggcggaaggattcctgccccagccctatgcaccagctggaactggggttggagacagaaattccggcccattccccgccatgaatgttgacggtatatgtccccgtcgtctggtaggcatcatttttgtttccatcccccaccagggaaaaaccattaatcgtgccggcattccggtctacattgagggtaatgtcggcggacacaatccggtcctggttgctccaccccatcaactgggcatttgtattcaacagggatgcaccttccccgatattgattacaaaggaattggttcctccgatggtgacgccggaagcagtacccgcaatattccataattgcagttttgtataggttcctccctccagattgagaacccggttatagccgtcttcataggtcccgcttgccgtaatgtctgttagataaatatcgccgggagaatccgcctgagtcacgggatccccttccggaggcgtaatcgtgtattggccgtcggcaaaggaaatcgtcgtctctccattgcccgtcaacgtataatcagaccatgacggagaaatgaaacaggccagaagagcggataaaagaaccaggggcaagcgcggtcgcataacactataacgtattgataatgaataaaattatttacaagactatatacttgttaatagttagcggatttggaatccgtagcttttttccaggtggcctccgttctccggcagactgaaatcatcagaccaccgcattctgaaaaaatgaatatgccattgaacaacaattttttagttaatacctcctcatctttcctcatcacggaaatacctcctgaaaaaaaatgaagggccttacctctccatattccagcttcctgtttaaagaggtggtaaattaattataatacttttttctaatttattatattgactacggattccaaatccgtacccatataaaaatgtttcgttgtaatagggtaaatggatgttgtattgcatggtggtctattttctcatttctgatttgttattattccagttatgtgtctccctattatgaaattcccgtaagttgtgatcccattatttatcatctcatgggacgcggaatgatggaagggttgatgccttatcgggatttgtttgatcaaaaggggcccttcatttttttgatatatggcttttcctacgccttgtgtggttcttactggcttgtattcgttcttgaggtattcgcagtgacggcctccatgatcttttgttacaaggcggcccttctcttcgtatctggaaaaaaagcgtttatcgtttcgctgctcatcctttattccatgtgcagtttccactattatgcaggaggaggtcatccctccgaatttattctgcctttccagtttgccgcgatttatggagtgtgccgcctgtatcgggatcccgatcgcttcgtaagaacgggcgtggtgtttggcgcgggcatcgggatggcgcttctgttgaaattcaacttggccgctttttggttcgttcccttcctgtatgtcctgtatcgtgcgcggatgaccgggaaggcatggatttttacaggaagcgtgggaggaacgctcctgttgatgctgacgccctgcctctggtatttttacagccgcggcgcgttgctggatttatatgaaggatacattgtttttaatgccggttacggcgccgatgcggtatcgttcaaggagatgtgccggaattattcccaatgggtgaaaagggatatcatgtatcctagcatgttgatgtacatcgtgggaggagcgggggtgattttaagccggatgcccgccagggaaaagatttattatacagccgcttttctgattacctgcatgggcgtccagggaaatggaaagacgcatttcaaccattacgcccagacacttattcccttcgctgctgtgggatacctggtggtggccaggatgatccatgtggaagaggttgtttcccgaaagtggcgccgatggctttttcctctggttgttgcgggagtgatggcttgcaccttcctgaattgcgtggatttttcatgcagaagccgcgcccgcgaatggatgtccgcttttgctcttccagataccagtgatgaaccggagggggagaatgcttgtgcagtccttgggcggcatgccgtatggttttactgtgtcaatggtttggtgccgcccatacgcacgtttacgatttgcgcttccgacaaacagggtgcagaacgggaaaggatgcgtcagtatcaggaaatccgccgcggaaagatagactatgtggtgatagcgggagaatacttcaagccggacaacacggaatctccctccctgagggctatgcgggatttgctaagtacggaatattgccgggaacgatcctttttcagagaagtgacgaacttggatatttaccgccgtgtgaagagggattaatgccccagttcttccatgatgcgttctgcaagagcccggggagagtcggaaggggaagccggaagtttccggagccattgttcgcgtttcagccaggtgcgctgccgtttggcgtattgccgggtggcgagggccagctggccctggcagttttcacgggagatttccccgcgcagcatgcttcgtatcaacgccaggcccagggtgcgttccgctgtggcggagcatgggccgagggaagccgtttcctccacggccccctcctgcatcatgcgtgcggcacggtgggctattctttcgtccagttcaggaacatccctgctgatgacccagccgggcccgcgcggcggggtcagccagttcctcttccagaaggaaagaggtttccccccggcaaggacgatttccagattgcgttccacataacgccggttggaggcatccgtcgaggccgctccttccggatccagggaagagagtctggcgtatagcgcttccgtggaacagttcgcgaaagcggcgcggagagcagcgtcccccggcggcgcttccgacaggccgtgggagaggaatttgaagtacaggccggaaccgcccgtgacgatggcgatttttccgcgtgcgtgaatttcttccatgcagcgcatggcgcggtggtagtgttccgtggcattccagttcctttggaccggaatgatggaaaccatgtggtgggggacccgttcccggtctgccggggaaggcgccgccgtcaggatgggcagctcccggtacacctggtaagcgtcggaactgacgatttctgcgtccagcatctccgccagttccacggctaccgcggatttgcccgatccggtgggacctgccagaaacagggtcatgggaagtgttgcctgatggggtggagaagattcaatcatcacgtggagtaatggcggataaagtttgttgttcctgtgaagccctaaaagctgctcctgcttaaaagctgttggaggaagcggaaaagcggaggcgaaatggcttcatatcccagggcgttgagatggaggccgtcccaagtataaaggctggcgtcttttcccggaaggaagaaatggagggggaggacatggacattttctccaaagtcgtgttgcagcagacaattcctgaaggtttccatgcgcgaccctttttgtgcgatgagcgggggaatgacaatgatggcggtcgtttccgggctgtaaatctccctgatttttttgacgatggccacgtttccctgaaaagccgtccatcccaggcttttttgtactcccagattgttgactcccgaatacaggatgatgattctgggcgccagcgggcttgtcaggccgtcattgaggcgccagagcaggttgcccgtggtctcgctcctggttcccaggttgaggcatcccagaggggaaaaccaggtttcccaggaatgtttcccttctttcagccagaattccatggtggaggaacccaggaacaacacgggggcatggggattcagccgggcattgcgtttgtcctgccggtgtttttccagcagggcgccctgttccggggaatagggaaggggatggacagccaaatggtagcggtaggcgtgtttggcgcaccagacggcgcctaatgcggccggaacggttaaaagaagaaagaggatacaggccttaattttttttgggaacatgggtgatgcggtcgttggcgacgtagggcaggcaggccgggaagaattttctcaggaagagatagagtgcgacgataaggaaaatgatggccggtattaatacaaagggtgcgaaaaaggattgtttccagatgtgggaggggatcagcatgatcaaaggataatgaagaacgaatatcaggaaacaggcgggggcatagttggacagctttctggcaacgggaattttcttttccagccagattccaagggccatgagaagaagcgccccgaagactgggcagagggaattcaaatggacagccggccaggagatattccatactccataggatgccagtattttgtgcatgttccattccgggttattctggcaaacgctcaagtaattggtgatgctgagcagaaacccggttcctacggcgagcaggacgaggggagtaaaggaatttttgtaaacgtgttttacttcagccagtttgatggaagacaggaaaaggcccagactgaacagggagacggtggatggagcaagggtaatcttgttggccggcacggggtattggagccagtccgtgctgaagcagatcaggatcaggacaaaaaccggatatttcaatttcagcaggatgggggaaatgagggaacagagaatgatatccctcaaaaaccatgtgggaggggaaaagggttctcccgtcaatccattgatggaaagaggaataaaatcgggagtgaaaagggagcggaagcctgcaaggttgcataagtattccggcaatcccatattcatgattcccggatggaggaaagagatgactatattccagaacagaaagggaatgagaagcgtataaccccgtttgaacgctttgttccaggaattattccggcccatgaaatagcctgccagaatcaggaaaaatgccacgcggccgttgaaaaccggaagctggaacaggctggcgaaagagaaggccggtgcgtggacgcatacaatcaggcatgccgcgaggaatcgggatatgtcaatccaatgttcccgggatgagggtaataaaattgtaggattttgcggtgtcatgaaagagtctgcctttggagccccctgaggcaggcaggggaaatgctcaagggcagatggctttttgtgtttcccggggatgtttgagacgttcggggagcggtttatttactgcgggatttccgatggccaggcagccgggaggcacatcccgggtgacgacggctcctgcggcgactacggagccggagccgatggtgactcctttcaagatggtggccctggcgccgatgaagcatccttccccgatggaaatgggttgtccctgttcgggtttccccagggttgatccccacctggcgccgctccggggatagtgcatgtcgttgtccagaatcagcgcgtctgctcctatcagcgtgtggcggccgatgcggatgccgttgacgcagaccagggtggctccgctgatgccgcagccgtcctccagagtgatgcttgcctgattggaaagggcggccaggcaggtgtgatgggaaagtaccggattcatccgggtaagggagtggatggtgactccgttgccgatggtgatggacgctcccgggaattttttaatgaggggaaatccggaaagaatgatgcctgttccggtgcgcacccccctgagcctgagcagcaggcggcctatcccggaaagcagatggataaggaataatttcatcagcgtggatacagcatggtatgataacgtgacaggcacccggttactgtctgctttacgtccagcaggcggcggcattcctgatgccgctccattcccatggacatggctttatccaggctgacggaaagtttctgcgcggcttccctgacggcggcgctgttgcggacagggacaatatagccggatacgccgtcctgaacatattgagtctgtccgccttcttccgtggtgattaccggaaggcccatgactcttgcctccttcacgatgttggggcagcaatcccccagggtgggatgcaccaggaaccacgccgtggaaaggtgctgctgaagttctgcgcgggaaatgctgcccagccagtggatattgggagtggacagggcttccagcctttccctgagggctccgttgcccgcaatgaacagctggacatgggaaagggaaggatgcgtaaaggcctccaccaggtaggaaatgcccttcaactcgtaaatggttccggcaaagaggcaggagggttccggggaaggttttctggcaagatggtaaaaggaaggttccacgccgtattccatgcaggatagacgggcatggggggcaatttccgcaacgcggccgcacgcccagggggattcgcacgtgataagatcataatgtttgacggccatccgttcccagagggcctgcatatggaggaggaaggcctgcggagcgcgctggcagtaggcggtgagggctccctggtaggaaaggagcttctttccccggaaggcaatccccgccagagcgtaagcctgctccacgccccatacgtgcaggaggtccggctggatatcgttcagggtcttgcgtattctccggacggtcaggaaatgggccgtcaggatattcctgcccatgctgcccaggggaagaatgtggatggtctggttgcgcatccggatggtttccggggcagaaacggctttgctgagggtgatccagtggatgtcaaaatcttcctgagattccagagcatgaaaaagggaaaaaatccagggaatcgtacgccggtccttattacggaaagacgtcagcagccggcccagagggaggtccgctgctatggctaatacgggacggaggcgtttgatcggcatggattggaaagaggaggcaaggttagcaggtgggtaaatgctcccggacgatggaagatgcgaacggaggctttccttccgggcggatggaggaaaaaagcagttgctcccattcctggtttactgcgtcgggggcgaaacaggcttcccattgccggcggcctttactccccagtagtttgcgtgttttttcgtccgtcaacgattccacggcttttcccagcacggagggggaagtgtttttcaggacgattcccccctccagggtggaaagagctcctgcgtctggagcgaaccagggaacgccgcatgacatcgcctccagaatggagaggggctgctgttcctgataagagtaaaggaaaacggcatcgctttccataatggcggcttctacttccaaacgggggagcctgtagagaatcctgaatctggggtcatccccgatggcttgttccatttgttccgcgtaggcattgtgctggggaatcagaaaaagaaaaatgatatgccgcagacgggagcgtttcacatggcggatgaagagaagctgccgttttctcatgctggcgccggcagggcaggtaaaaacgggggcggaggaaagtccgtatttttcccggaaaaaaggagcggttcttttcagagccgggaatgtgttgggaatgcaggagtaatgggcaagtttgcttctggatgcgcagtaataatcaaagctcttgaacagtgtcccgtaaggatcgagaaaaacgagacggtttaacggtgatttccggcatacgttgaggatatccctgcgtacttgaaaaaaggagcagagccattttttcaggccgaagaaaggagggtaattgaagcggaaaaaagagcggaaattggtagctgcaccatgggagcggaggaaaaacggaatgcctgaatcccgtgccgcgtccagcaattcttcccggcaccagtccgcccaggagtggtagataataacatccggccggaaatctttcagaaacccgtccaggtattcccttaaacgggcactgtccttcgtcagggtgtccggcagggttgtgagaaggctgtattggtgggagcggaaggactcatccggtgaatccagcgggcgggtgaggacgtggatatcccagtccagggagctcaggctgcaggccatttcataggcagccatgcctacgcctccttcctccggaggaaaaacatatgtaacgatgagaaccctgcccttgctcacgggcggtaatgtagatgaaaagaaaaaataaaacaaggacactttatggaactgttccggtccatggaacctgtaaaaatgaggaatttgttttttatccggtgagcgataaggaggcgtcatgggaacaggcgattctgccaggtttctatcccctgtgaaggcctgttggctgaggcttcataaaaagatattgatgcggcaggatgttgtgctagattggcaccgctttccgtacccgtatagccgcaatatgccgttggtatattgccggttgaataaataatccggttattaataaaacagatatttttaacttctcccgggaaaggataaggttgatggaataaataacatggaagaatcccgcgtaaagaaaagcctgttgaacgccagggtcaatctcattttttatgttttgattcttctcatttcctttttttcaagaaagatattcttgaattgcctgggtgccgattttgtcggtttgacgggaacattaatgagtctgctgaatttcctcaatttggcggaacttggtataagcacggctatcgggtatgtgctttacaagccgatctttgaacatgatgagaccaggattaatgaaattatctccgtgctgggatacatgtaccggtggatagggcggataatcattgcggctggagtagcgctttcctgtttcctgccggttattttcccttccacaggtttttcctatggaatcatctattttgcttattattcctttctggcctcttccctgatcgggtattttgccaactacaggcagacccttttgggagcggaccagaggaattacgtagtggcgttttatttccagacggcatccatcatcaaaatcatatgccagatgctgtctgcatggtatacgggaagttattatttatggatagggatagagctgttcttcggcattatttattccttcatcctgaattggaagatcaatcaggtctatccctggctgaagagcaatgtggccctggggaaggagctgttcaaaaaatatcctgaagtcactaaatacaccaagcagttgtttatgcatcggctgggaagctttttccagttccaggtgacgccgtttctggtatatgcctttgtttccctccagatggcggcctacttcggcaactattccaccattgtggagaaactgcaccttctggtcaataatctgctcggcagtacggaagccagtgtgggcaacttgattgcggagggaaatgcgggaaaaatccgcaaggtgttcagtgaattgttttccctgcgcatgctgattgccgggacggtatgtttccccctttaccagcttttggagccattcatcacgctttggctgggagcgggctatatccttccccgggaaatcatgctgctgctcgttatcaggctgttcatcaccattacgcggggggttgtggatcagtttttatacggttacggtttgttctgggatgtatgggctcctcttgcggaaagcgtgatcaacatttccgtggcgatcatcggaggttacttatggggattgcccggcgttttgctggggggcatctccagcctgatacttattgtgggcatatggaagcctttcatgctgtataactggggattcaggaaaaatgtgatgaactactggttccaattcggttaccagctggcgctgattttgatttcggccgtgttcatgggctggatctggaaatttgttcctctgcagccttccgcgtctttcttttcctggtttttatgcgccttcctcatggccgtttcttatggaggtgtgacggttcttttaatgtattgcggtacgcagggcatgcgcggaatggtgcgccgtgcgctggagatggcgggaacccggttgccgtggcggaaaaaaactgaatagggacgcagaggtgttgctgggcatcgggaatggggacgctgcgtcatttatgctcaatcttcagtagtcgtttcggcttccgggtcaacaaaatcctccaccgcctcggagacaatgatattgctctccatggaggaaaatccgtaatacgccggattgacgttattgcaatgcaagtgcatcgtcgcaggaaggaacgctccggccaacgcccagctgttggtattctccatatcaagataatatccggaaaatggataaatattctcaaagcaatggactcccttcaccgtggcgattttgacgcagccgcgggaggaattcccgccatgcagcagccacagcgcacccctgtcttcagtatcatatcctccgtcctggtattgctcgtaaaccaccgcgtacacgcagacgggataaccgttattggaagacgtctcctgcgcgaaggcctgcgtcgtcttcatcttccatttctgttcggcattggaataatagatctcccggacacgaatgtggtatccccccgcgtccgcgtcccggataggatcaaacgtaatatcgataatctccccaatcctgtagccgccggccgcctgatccggcaccagcgtaaacgcgtccctgtcccgccccatgcgcgcaaccgttgtcatctggccgaacctggccgtgaatttcgtgctgacagacggcagtcgcagcggggccacccaaccccggatgctggaataattgtgcatgggcctcgcgttggtcgcgaggccgcatttcacggtaaaggcggaattgggagggacattgaaataaagggaattgggttccttgtccgttttgaaaaccgtcccattggaagacgagcaatccgccaggagcggataacacctgacggaaaaagcgtcagttacggcagccagcccggcggcgtacaggcggttgaccgctgacgtatccgttgccgcccccacggccagcgggatgttgatgcctccgttggcgttgacggcccctgcaaaagtcccggactcagccgtcaggttttttaattcggcattttctccttgcctgatgccgttctggcctggcaaccctggaacggctgttttgaaaacctgggtgatcagggcgtcttcatcggatacttctacggcgtccgtcggggctgcaaaaccgtattgcccttttttctctgcttccagaataagcatggacgtctctccggaattgaagatggcgcttacagtacaagcttttgtacaggtcatgacataggaacctcccttaatagtatcaactttcataaataaattatttttttaactattgataaaactccggaaaaatcatcaggcataaaacgttgagacgtttctgaagaagtatgcgggcggttctttccggattcgggaaaattccggaatgaagctgagccggcttgttaaaaaaaatagccggctccggtatttccccataaaaggcggttttgtaaatggccggatgtcagaaaaataaggccttcctccgtatttctactgatgcctgccttgtaaaagccgtttaccctttcccaggaggcatctcattttggagatgaacatccggccgggatcgttttgcttccggaaatccctgatgtcctctttccacggagatttcttccaatacttgtagaacaatccgtaatcctggcgaatgctgttgggatgccagggtttgggatggccccagtagtggataatgcccggccgcctggcggcttccagcaggtctgccggctttaggggattattcctgaagcttttcacgccttcccagcgaatggaccagatagccccgtcgcaaatgttccacatggggtgaagcaacaagatacgctgctgatagcatacattcaaaatatcctgatcctgccaggaaaggcggtgaatattgtttttcgcccaggataaaacctgggattcaaaacattcttcacgtattcttccgatatggtaaagaatgacgccggcattgatgtaaatggagtcccggtccagattcatttctctcttccagcgagaaaaagactcctcggataaatcttccgtggtgaaaacgccggcaatgaggcaatctccgaattcggattcatacatggggcttatgtccctgttgaaaatggtatcaatatccacgtaaagggcgcgttctaccgtggcgggaagttcccctgcaaggccaagacggtaatacgtcgccgccgaccatttggaaccgacggggaaatccgtatatttatccttcatgtcaatgaagtgcaaatggagattgtagccctgttgcagggaatggaaacgggccgtattatccccgcttaacccgccggtcatgatataaatatcggcatgaacgccgggcggcaaattctccatgagggacacaatgctcacgcccgttcccagtgcgccgttatcgtctgtagcgtatacgatattcatgagtgtgaacggactggatcttggtgtttgctctccattccgttattggtttgcagccggaaaaacagggagcggcccatcctttccaggcggtccagccatttgcaggagaacatggtcctgtccatgagcgcggaaaatgactgttccatgcctgcccttgcggaacacgctttcatataggagtccaaaaacggccggttcaggcatgggtgcatgattttcctgatcctgcccgtcagggaaatccgctcctctgcgttgagcgataacagtcttttgggatgcaattccctgatgaccagataatggacggcaaattgccatttgggatttttcatggcttcaagctcattcagcagaggcgcaatgagtgagtggagggagatatgctggtaatgctcgtcatgcatggcggaagaagctctctgcctgtagatggaggtgacggagcctcccagcccgatcaggcctgtcccccgcatgcaccgtgtccagtacaggccgtcttccccatagggcatcgcttcttcccaggggggaagccgggacgcaagagacgaattcaggattacgctgctggaattcatgaaaagcactccccgtatccccaatctccggatagattcgggataagatggagggcgcggcgggatggcctccagttcatccctcatgtagcggttggcataggccaatatctccggatgacggttgaaaaaatcggctgccagctccagatgctcgggataccagtaatcgtctccgtccaggaaagcgatgtaagcccccatggccttcttcatccctgcgtttcgcgctcgcgatacgccgccgttaacttgggaaaccaggcgaattctggggtcatgaaaagattgaatgatggaaacggtctcatcggaagaaccgtcatccacgatgatgatctcaaaatcctgaaatgtttgaaccagtactgactgaagggtggcagcaatataattctccagattataggccgggataataatgctgaagaacggtttctgcatacaaggggaatgatgaactgcttcgtgagtggaacgggaatcaggatatggagaacatgattctgatggggctgtaaccattgcaaccggcgaatggcaggaggacgaatccatcgttcctcccatgattcatcagtgcgcgaatgaacctgtcatagcgaattccaaattcgattgggaaattccggattcagcatgaatgaacagagaattgtcccaagacctcatggaaccggtggggtatggaggtattccggctaggtctggttctaagagttctatgattctaaaaaataattgcttatgaaaaaatgtgtatgttgggagcagtaagggaaagcagaatctttcgtcctgttttcccggcttcgggctccctgcccgcaagggggagattcttgatgacaaaacgtccgcgcaacataagttccttggtataaaaatcaacccttgaccccggatttggaatccggtatgaacgtgacgccttattaataaacagaaaaggacatggtcctcttcatggttgacgctttcttttccgtgctttttcttcatgaacccttcggaactcccttccatcagcattatcctgaccgggcataatgaggagagcagcatcagggatgctatccggagcgtattcgggcaggattatgaagggccggttgaaatcatcctttcggatgacggctcttccgacggaaccttctccgtcatgcaggaaatggcggctcaatacagggggccgtaccgggtaatcttaaaccggaatgaaactccgctggggcgcgggcctcatatccggcaggcggttggtctggcttcccatgaatggattctccgtcaggatggggacgattgttccttcccctggagatgcaggttttttgcctgggcggtgatggaacgcccggatgccgtggctgtggtcagccagatgaccagcgtctatgaggaaccgggcattgcgtttgaattcccggcctttcctgctgctccgcgggaaatgccggctgttgcgcttcaggcgggagctttttcttcttccgcccattacggaggaagcatgatgatcaggaagagcgcctgcgaatggggtagctccctgcggatgacggccagttttgaagacgacttgatggggttccacgcatggcttcagggcaacatttatgaaatgccgggcatatccttatattattaccggtttgcgcttaaaaatatttgcgctgtcaacagcgcgttccggtttgccgacatgcggacggcggcggcctttgaaaaaagggagctggaaatgaaaagccagttgaaaaaaagcaaggaggcggggttggaactgtgcggggaattgctggagggccttgctccggtttttcgttcgcgggaagaactgcttgccgaaatggaggagaggagaaaaatcatagacagcattgaccggcagcagaattggtggagttatccctttcggcggagatgggcgttgaggcggccgggatggatgggtatcgtccactgcctgccgcaaaagctgtatttgttctgcatggttttctttttcaagctcaggaaagtgaaacgggccgtttgcggcgcccggcaggatttggaataagggcaaggaaacgcttgaagaaggaggggaacttttgctcggacgggttctccccggtccggcgttgtttttgatggagaggggggcggaagatggcttctccggctcgaaagaagccgggagggggagccggagtgttgatgcgtgaagggttttctccggaaaaagaaaaagcgcctttccaagaaagatggaaaggcgcggtgacaggttcaggggcgaggccctgaattagtatacgtcccgctggtaacggcggtgttgtttcatatccgccacatatgccgcggcttcctccggagttttatggccccaggtctggatgacttcatgaagggcgttgtccacatccttcgccatgcgggaggcgtccccgcagacgtagaagcaggcgccggcttccagccatttccagagctcttcgccttcctggaccatgaggtgctgcacatacaccttcttttcctggtctcgggaccaggccacggacaacttcagtttgccggtgccggtcaactggttcagctcgtcttcataacagaagtcggtagccctgtacggattgccgaagaacagccagttgccgcccttggcgccggaagcggcgcgttcctcccagaatgcccggaaaggggcgatgccggtgccggggcctaccatgataatgggggtgtccccgtcttccggaaggcggaaattcttgttggtatgtacgaataccctggccgtatggcccggctggaggcggtccgccatataggtggagcaaacgccgccgcgcttgcggtcacgggccgtatagcgcaccgcgcccacgcacaggtgaacctgttcgggatgggcgttcgggctggaggcgatggaataaaggcgcggcatgatctttttcaggatgccgacaaaagcctccgcggattcgaaggaagcggggtattccgtggccagatccagcacgtcccggccccacaggaaatcgctgagggcgtccttatccccggccagaagcgtgtccagctcctggctgccggaggcggcggcccacttggtcagcagggctttgttgacattggtaatgtcatagcagtgaaccagggcgtctttcaggcttgcggtttccccttcgggcgtgggaacctgggaatccgggctgaggccgagcctgtcaatcagggcgtccgccagggaggggtcattggcgggaatgacggccagggcgtccccggcaatataattcatcccggaaccgtccaggctgtattcaatgtggatggtttccttggggctgccttccccggtgatatgcctgacggagaggacgggagcgggaaacggattttttttgccgtatggttcagtggtcatgatgatggagggggggtgaaaaagaatattaccagcggataacggcggcggaccaggtaagcccggcgccgaatgtgaccaggacgacgttgtctcccttgccgaatctgccggaacggcgcgcttcgtcaaaggcgatggcgacggcggctgcggacgtgttgccgtacttctcaatgttcacgaacaccttatcttcaggaatggaaaggcgctgcgctacggcgttaatgatgcggagattggcctggtggggaataatcagctggatatcgtccgccgtgaggccggcgcgttcaatgacgctggcggcggaagccttcatgcgcgtgacggcatggcggaaggtctcattgccgcgcatggccagggtagccaggcgttcatgggcgttttccgctgtggtggggcagcgggagccgccgcccggaatctggagcaggtcatgcagggagccgtccgaaccgatatccgtggcaaggacggaaccttccccttcttcccctgtggaagcctggagcacggctgccccggcgccgtccccgaacaggacgcaggtgctgcggtcctcccagttgacgacggtggaaagtttttccgcggcgatgatgagcgccgttttcatctggccggtgccgatgtactggacggcggtcttcatggcgaacaggaagccggagcaggcggcggaaatgtcaaaggcggcggcattcttggcgccaagggcatcctggatatagcaggaagtggaaggggtgaacgtatccggcgtgatggtggcgacgataatcaggtcaatatcctccggcttcagcccgcaggattccagagcgcgctgggcggccttcgtccccatatgggaagtgtactcgtcaggggcggcgatgcggcgttccacaatgcccgtgcgttcaataatccattcgtgggaagtgtccaccatcttttccagatccgcattggtcaggcggcgttccggaacataggaacccgtaccgataatcttgacgggcagtcttttaaagggaatatcagaatgtgcggccatagctttgggcgtatgatgaacagaaaacgtcctgacgttttatgtggaaacagtctaaaagaaagagggcctgatgaccagcataaaacgcaggactcctttcatgtcgtaaatgaatggcttacaacagccacccctggccgttggcgggcggcgcggctcccatcttgagataggcggagggcatcgccacgcgccctctgggggtgcggctgatatacccctgcataatcaggaaaggctcgtgcacgtcctccagcgtggaagcgtcctcccctacggccaccgccagggaggaaaggcccaccgggccgccgttgaacttgtaaatcatcgcttccagcaggcgcttgtccatctcgtccaggccgtcgtcgtcaatctcaatcatggtcagggcgtcgtgcgccaactgctccgtaatcacgccgtcgccgcgcacctgggcgtaatcccgcacccagcgcagcagggaattggccacgcggggcgtgccgcgggagcgcagcgcgatctgcagggcgccctccgggtccacgggcacgttcagcagccccgcggaccgttcgataatggcgcacagctcctcccgcgtataataatccagccggttcactaggccgaagcgggaacgcagcgggctggtcagcatcccggcgcgggtggtggcccccaccagggtgaacttgggcaggttgagctggatggagcgggcatttggcccctggtcaataataatatccagccggaaatcctccatggccgggtacagatactcctcaatggccgggtgcaggcggtggatctcgtcaataaacagaatatcccccttttccagattggtcagcacgccggccaggtctcccgccttttcaatctgggggccggaagtcgtatgaatgcggcagccgacggcattcgcgataatattggcaagcgtcgtcttccccaggcccggcgggccgctcaacaggatgtggtccagcacgtcgtcgcgctgtctggcggcttccaccatcagcatcaggcggtccttaatcttctcctggccgcagaactcgctgaaagcgggcggtctgagggacaaatcgaaggcggaggagggggcctccgtggtgcgtgtgtaaaaggactctcccatgcgcaggactagcaaacccgtctttggggcatccgtcaagggggaagtgcggtcgggaaacgccttttccgggacatgccggaagcctttggctttttttgaggacgggaggaatgcggagccgcggaaatgatgatacgcggagaaacggcatgtcccgccttctcttcttacagcatggattcccatttttgctgcgccttcccggaactctcggaaccctgggcttccggaatccttcagtcttctcttcccgtctcgctcctgaaacttctcaaatggctgctggtcaatcctggagcccgtacggaaagaagcttatcaatagcggttcttacctgaaccttccccgattgcccggaagccgtaaaggtggagaaagagaaaaattcttatttgctccgcgggaaaaacagggcagggagggcgaaaatctgccatgcccacatggataatttttgtgaaccacggaaacctgttcctttcaaaacttctgaaaatacgcttcgttgctgtttatgcccgttgaagattttctcgcgctgtcggggcacttttcatcctcttcgcgcaaccgccggaaacgtgaaaaaactcggggaaaacggggaaataccttccggatgaaaaaaagattgccaaacctctcttctgccgttattctatccctgctttcctatctagcacaatctccaacgggcaggtgtcagagtggtcgaatgagcacgcctggaaagtgtgtgtaccgcaaaccggtaccgagggttcgaatccctccctgtccgccatcaattttctgccgcaatatactcgtgatgagtatattgcggttttttgtttgcaaggctataaggaagaaatggggaaataagttgttttgtttagattaataaatattccatttcttaattatatcatccaaaattttcttttctgaagtagaagtgtaaattgacctttcaaaaagaacaccaaaatgctgatctttataaaaagaaaagaaaaagaatcctttatcgaatttttgatcatgttgataaacataagaaaatatatgttccccgttatcatctaaaaatgatcttttatcaggatatttcatcattatattgtatatttctggataattatacaagggaaatacaacaaagtcataatttttataattatgtgaatcatacactaaaaatccttttgctagtctgctaaaaaaaggaagtattttttctgtgtaagaaactgttatgttgaccgcttgtgaaaaagaatcttccatttgaagaatctcatatcccctgaaacctcttactaggtctgcacaaaaattaattagactttttccaattttaggttcggatttgttgttccaaatccaatctcctgcttttgaacgataattgccactagagagcaagaatcggaattcttcatcaagcctagcgtatgagttattacattttctacaacataaaacagttggtaaattaacttttcgatcaaaattttcaggaaaaaatcctcttggtggaatatgatccacagttctattagaagaacctctagatagtttctttccacataaataacaaatttgcttatatctcttgttcatcaacaatgatttcaaggaaagatgaaacgttagaaaaatcagttatctatttcttttcgagttttattcaaatatgttcttataatatttagtttttcaacaaaaaattgtcacgaaattctgctcggttaataattcatgacaatggtaaatttttgatataaaaatctatcgttatttcaaatttattaataaatttaattaattcgtcagattgaattcaatagttgctgtgcggaatctctttatttcttggtttaaaaatttgagttttcaaatcttttgatactttgtaataaatacataaggaagttaaaagagtcatgaagtttttgttcttgaatagttgtatccaaggatttggtagtagctttctttatgggagaaaatatatccttggatttactaataagctcactaaaccatccacatattttctaaatttataggaatcatttgaaataagaatataatctctcaacatgttcgtatttagtcttttttgaatgattatgcacattttattatctcgagctaaatcttttgagaaaccttatctgtaatctctatagttagtcttttttaccagtttcagatatatttgatatttaaagggaaccgtcgggattgccgaatcacgttactcgcttagttcggtgatgtcggtttcgggtttcgggtagcctttgccggcaatccactttttcgtttcctccaccatttcaggggtgacgttaaagtcgtactgggcatagtcgccgatgtggaattttccgggtttgaagaatccccatttctcaaagaagtctgtcaggtcggtttttgtgacgtcacagcatgccttgacgaattcgaactggtatttgacggtgtcgttccctccgtagtttcccgcgttgttgcgcaggtactccatgacgtcaggatagaagtcggggtgtccgtttttggtaaagtaaagatggagctgccacaggggaaccagcttgttgaaaacgtccttagattgcaggtaggcgatttccccttcgatgatttccttgcgcgccttgtcgtagctgccctggcgcttcaggcggctttcattgcctgttttggctgcggcctgcagggaaaagatgttgttgctgacttccgtcatgccgccccaggtcatcgggcgcatttgcatgacgtgtcctacttcgtgggagaatccccagcaggcatcgcccttgagaacgttttcagggtcggtcaccatgcgcattgtcccgtcgtttccgaggtaggcgactccgtctccgtcgcggaacatgtagtagttgaagttcacgcgggccaggacgcggttttccgggattttgccgtatttatccaggcccatcagctggtattggatgccgatgagcttgtcgtaggcgttgatgagttcggttccgcggtctttggtgaattttttcaggaattctacggggtaggcaacctggatgtattttccccgggcatccatgatcggagagacggcctggtcaagcaggcgaacccagtccttgttggtgtcgccccgggtggtgtcaaagtagccgttggctttgccggttacgaagtggacgggaattttcggcgccttgccggcgtcttcggtgaaatagctgatataggcgttggcgggcgtttccacgtcaatgatgttgattccttccttgagcggaatctgctttttatgcaatccccagccgttggggtcttttgtgggctgcactccttcggccggcttgcgcatcaggttcggcagaaggaggctgatttcctgcccctccgtcttgccgaccaggacgacatgcctccccttttccagatagacgcccgtcatgttgtcgtatttgctgaatccgtcgccgattctgagatttttccccgtctggcgcggtgaggggagggcccggtattcggcatacaggtagtccggcttgtaatggcctgccaggattttggtcgcgagttccttcatcgcgtcagactggaaggcggaggtgtctttcacatccggcttcagggaggtgcaggaggagtctttgaacagtttgaggtcgttgccgatgtgttccggcgtattagcggcaaataccgctgcgagcgacagcaggggaagggatagtaatggaaggattcggttcatgacagtacgggaagcaggtgattctgtgatgttacaagatacaggttccgttttcttcttctttcactatttttctcttgattaataaataggcaggtagttcgtcagaagagaggccgggcggttgatgtgtggaatggctttggcggtgcggcagggatttttcagacgatttcgcgtttccggatattttccccggttccggcgggcgcttttccggggatccgtattcggatgggcacgtttcttgctggtttgaattttgggccgaagccttccgggctgcccggcggcggtatcgcgttcctgccgcgcgttcctctttagtgtttctttttctctggtcttggcgcacatgcatgacatggttgttgtgcggcaggggaaaatggaataaggtgaagaggatgatgaattccgtattcaagtgtttgatgagtgccgtatgcgccgtggcattgccggcgttcgggcaggaagagaaaaccggtttccctacggacagggctgtgaccgtattcagcgccggggagggtaatccctatgcgtccatccgtattcccgccctgctcagtatcggcaagggccagcttctggcattcgccgaaggacggtacaaaaataccgaccagggggagaacgatattatcatgagcgtcagcaagaatggcgggaagacctggtcccgtccccgggcgatagccaaggctcatggcgccacgttcaataatccgtgccccgtttatgatgccaaaaccaggaccgtgactgtcgtattccagcgttaccctgccggggtcaaggagcggcagcccaatatcccggacggatgggatgatgaaaagtgcatccgcaatttcatgattcagagcaggaacggaggttcttcctggacgaagccgcaggagatcacgaagacgaccaagcgtccttccggagtggatattatggcgtccggcccgaatgcgggaacccagctgaagagcggcgcccacaagggccgcctggtgattccgatgaatgaagggccgttcggcaaatgggtgatttcctgcatttacagcgatgacggcggcaagagctggaagctgggccagccgactgccaatatgaagggcatggtgaacgagacgtccattgcggaaacggataacggcggcgttgtgatggttgcgcgccattggggcgcaggcaattgccgccgtattgcgtggtcccaggatggcggggagacctggggacaggtggaggacgctccggagctgttttgcgacagtacccagaattccctgatgacgtattccctgagcgaccagcctgcctatggcggcaaaagccgcattctgttttccgggcccagtgcgggccggcgcattaagggacaggtggccatgagctatgacaacggcaagacctggccggtgaagaaattgctgggcgagggcggttttgcctattccagccttgccatggtggaacccggcatcgttggggtgctttatgaggagaaccaggagcatattaaaaagctgaagtttgttcccattaccatggaatggctgacggacggagaagacacagggctggctcccggcaggaaacttaaatagaaagggactttgggaaacagcttttcccgctccttttttgtttgtgataagcgccgttgtcgtaacggttccggttttgatgctggtccgtgattatccctgaatacggagatgccgggccggcaggccggggtaaaggcagatggcggggagcatgtaaacagaagcgtcaaacaatattattttgtcattagaagagctttcttcatgaagtagcggttttccgtttgtcagattgcctgtaacaggtaccacgatggaatttgtacaggacagaggcgggattccgacccggatgcctgtgttgttctgtatgacagggtgtggaagatttaccttcttgattccagaacgcttgcggatattctgcaaggcatccgttgcccttggagcttttcccatttgggaaggccggtgagcggaaggtgattccccgtttcaatatatgtcctggatttatctggtgttggccggtctctgcgagatcggatggcctctgggtttcaaactttctcaaacgcccggcacagggcccggcaaattcgccgcctgtatcgcctgctccgttttcagcatggttctgagcggttttcttttgtggcttgcccagcggaacatccccatcggcaccgcttatgcggtatggaccggcattggcgcgttgggcacgttcctggttggtattctgtggttcggggattcttccaatatctggcgcatgctggcggcatccttcctgctgataggcattatcgggctgaagttggcccccgggcattgatgcggtcttcggcatccttgccgggtttcgggaaaagccgtctccgcggctttccggataggaggtctcagtagtgggagatggctttttcccacacggtcccgcaggcgtcggaaggcatgcgccagtccccgcgcggggaaagagaaatggtgcccactttggggccgtccggcatgcagctgcgcttgaattgctgacggaagaaacggcggatgaagatgccgaggcagcggcggatgaagtccggctgaaattcgccgcggaaggcatgttccgccaggtgcaggattttatccggttccgcaccgtatttaatgaagtggaagaggaaaaagtcgtgcaggtcgtaaggcccaagcacatcttccgttttctgttcaatggtgccgtcgtccgacggcggcaggagttccgggctgacgggagtgttgttgatgtccgtgagggtggctgccagttccggggatgattcttccgcgatgtgttcaatgaggcagcgtatcagcgttttcggaatggagcagttgaccgcgtacatggacatgtggtccccattgtaggtgctccatcccagggcaatttccgacaagtcccctgttcccacgaccagccccccggttttattggccaaatccatcagaatttgcgtgcgttcgcgggcctggacgttttcataagtggtggttcgttcggcaggatcgtgcccgatgtcggcgaagtgccggaggcagcattccgagatggggatttcacgaagttccacgcctagaaggcggcacatggttacggcattgtcatgggttctgtccgtggtgccgaaaccgggcattgtcacggccagaatgtccgaggcagggcgcttcagcgcacggcaggcgcgggagcagatgagcagagccagcgtggagtccagcccgccggagatgccgatgacgagccgttgcgcgcgggtatgttccattcttttggccagacctgccgtttggatggagatgatttcctcacaccgttcccggcggcgggacggagaaggcagaaagggccgtgccgggttgaatgcgtattccaggccgggcgctccgggaacctgttccggcagggccagatgcagggcattcccggcagggaaaaagaatttgctatcattgaaggagctttcagagaggcgcgccgcctccagccgttcaaaatccacgtccgcaaagatgagggtgctttccctgcagaaccgttccccctccgctgctggcctgccgttgtccgcaatgagggaatggccgccgaatacggtgtctgtggtggattcatgcacacctgcggaggaaaggacataggcgcagaggcatctgccgctctgctgtctgaccagttccctcctgtatgcggccttaccggtgagttccgttcctgcggaagggttgagaatggctctggcacccagaagagccagtttggaactgggaggaatgacgctccacaggtcttcgcatatttccacgccaaaactgaagggagacgattcttcatgaaaaacgatttcctccccgaacgggatatgcaccccattgattgtgacttccttcactcctgtacccaattccctgccggaggtgaattgccgcttttcgtagaattcccggtagttggggagcacggttttgggcaccagagccagaatgcggccggactgcactaccgccgccgtattatacagagcgtcttcatgaaggaagggcaggcccaccacggcaatcgtgccggagccttccgtggcttctgtaaagcggagcaggccgttcagggctgctttcctcaagttcggctggaagaaaaggtctccgcaggaatagcccgtaatgcacagttccgggaaaacgacggccgccgcctgctgttctgcggctttccggaatccctccgtaagttggtcgacattgtagcccacttcagccacgcggagctgggggacggcggaggcaagtctgtaatatccgaacatgggcggcgcagtctgaaaaatggaacccgcagatgttcgtttttcccgtagtcaggacacaatccgggaaaggcgggcctgagccggatactaaaagttcatgaaggacttgtaaagccatctgtagggactgctccgtccatgttgccggggaatgggcaaggaacgcaatctttcccgcatgcctttctgcatgacggtcaccgggcaaatccgttttttcccgggctcccgcagcatggcggcttttcttgagccgggtacggcattgaggctggaacagcgggagaaaaggagtaaaccataccctgaaaactaatgaataatactgaccgatttactggaaaagcccgggcttatgcccagggcagacccgattatcccgcctccgttgttgggcttctgacgcgggagagccgccgggagaatccccgtctggcggatatgggttccggaacgggcattctttcccgcgccatgctggagcgcggctggaccgtgtatggcgtggagcccaatgatgacatgcggaaggaagcggagaaacggctgtccgcttttccccgttttcattccgtggcgggaacggcggagcggaccgggcttcccggagcttcggtggatctggtgacggcggcgcagtcattccactggtttgacgccgccgcgttcaagagggaatgccgccgtattctgtccggaggaggcaaggttgccctgatttggaactccagggtggaagacagtcccattgcccgggaggaaggaaatatccaccgtctttactgtccgtgtttttatggattcagcggagggctggcgaagttgacggacagcattggagcgtttttcaaccaccgtttccagatattccgctttccaaatgatttgtcctacacgcgggagcagtatctccgccgcatgatgtccacctcctatgccttgacggagggcggagaagagcggtcctcctggctggacgccctggaaaagctgtttgaccggtttgaaacggaaggacgcgttacggttccgaatgaaactgtggtgtatctagggaagtgctgaggatgcggcgttcatgcatggcctccggaaaaggaaaggcctcttttcggttcaggaactgaagatgatgacggcaaggacggcaatgattgccagaacgacaacgatggcggtaatatagccgggtttgtgggcatcaagagtccactcctttttgagatgggaaagatcctcccctgccgcatagcgtgaaaaaaggtcatggagccgagagtagtccaggtctttgggcgtcatgtaaagctcactgtcctttccgctggcaaacgaaatttcgcaatggtaattttccggactattgcaggtggcctggaggaattcgtcaccgcggctgcagataatgaaagcttccgtgttatttttaatgccggacagggcttgatcccgcgtttcacagggctctccggaaagttcccaaacgatggagggggcggaatgaaggctcatggaataaaaaatcagaaaatatagtagagaattatttttcctgccgccagtaaaaactttcctttcttcttcctgggcggaaagtgttccctggcgcaacactccggagagcgctgggagcgcttgagggttggggcattcaatggctgtttttccgcttatcattccggttttgcatgggttctttctgccggggcgttcccttcgcgtttttccagccatgtaggctgacgtttccattcctctggaaataatcattccgcggcttcaggcatggctattttctctcgctattcttgctttattaaggcaggccatccatgttacgattatttattgccatgatgcatcagactttttcccaagagccttttctggtttccggattgcatggggaccagattctgggcgcccgcagtaaccaacaggattttttctccattctggctggagaggacgcattggtactggtgctggcggacggcatgggtgggtataccggcggagagttggccagccgcgcggcggtggaaggctgttcgcgggcttttgagcggaaatccggtttgcccggagagagaatgaaagctgcagtgaccgccgcaaatgaacaggtatggtccgcccggaagaaaagaggggaggatgacgagatggggacgacgctggtagcagcctggataggggcggatgggctgaggtgggtcagcgtgggggactcccttctgctgcttatccgggaagagaaaatgtttctgcttaatgagctgcaccagtattccgcggaattggagcgcatggcggatgaagggatcatcagccgggaggaggctttgagccatcctgcccgccattccttgacttctgccctgatggggaaggaagttcctttggtggatttgcgggaggaatgctttcccttatttccgggggaccgtgttttggtcgccagtgacggagtggggccttatctggattccctagggccggcagggatgcggtatttgtccatgctttccgcggaggaactggtgcgttccgtgctggacggcattaaccgcgacggcgcgcccaaccaggataatgccacattgatttgcgcagagatagcaagggcttgatctgcattagtgcggcaaggaggtaatctgcggacgggcgatttttgagattcacatcctccgtctgccggacgatgaataaaaccccgcatgcgtttcaggcatgcggggttttattgaaatagccggagtatttcccgttcaggaatggtattcctggagggaacggggtgataccttcacgtgctgggcggagcggatgccctccaccgtggccctggcggctgcgatggtagtcatgtacggaattttcttctggatggactgcatgcggatgaaggagtcgtcaatcatactggtgcggtccaccggagtgttgataatcaggtcgatctgcttgttggtgatcatgtcgcccaggttcgggcggccttcatgcagcttgttgactacttccgtttccacgccctggccgcgcaggtattctgcggtgccgccggtggagacaatcgtaaagcccagggaaatcaggtcccgtgcgatgggttcgatgaacttcttatcccggtcggaaaccgtgacgagcaccttgccggaggtaggcagaatgcagcccgcagcttcctgggccttgtagtaggccatgccgaagttgtccgcaatgcccatgacttcacccgtggcgcgcatttccggccccagtacggggtccacttccgggaacatgttgaaggggaagacagcttccttcacgccgatgaaacggcaggcgcgcgacttcagacccagctccttgagtttcttgcccagcatgatttccgtggcgtagcgcgccagggagatgcccgttaccttggagacgatcggcaccgtgcgggaggcgcggggattggcctcaatgatgtaaacctcatcgttgcagatggcgaactgcacgttcagaatgccctttacctggaagtcctgggcaattttggcggcatgttcctcaatggtgcggatgtgcttgggagcgattgtcacgggggggatggcgcaggcggagtcgccggaatggatgccggccagttcaatgtgttccatgaccgtggctacaaaagtatccgtgccgtcggccagagcatccacttccgcctcaatggcattgtccagaaaacgatcgatcagcatgggatattccgggctgacctggatggcctccacgccgtagcgcttcaggttttcttcatcgtaaatgacttccatgccgcggccgcccagcacaaaggaggggcgcaccatgaccgggtagccgatgcggcgccccagttccacggcctcctccagggaacgggccgtgccgctttccggctggcggatattcagggcgatcatgcgttcacggaaatattcgcggtcttccgccagacggatgccttccggctgggttcccatgattttcacgccggcgtctttgagggcctgggcgatgttaagcggggtctggcctccgaactggacgatgacgccttccggcttttctttctcgtaaatagccagcacgtcttccacggtcacgggttcaaagtacagcttgttggccgtgtcaaagtccgtagaaaccgtttccgggttgcagttcaccatgatggattcatacccgtggtcgcgcagggtgaaggcggcatgcacgcaggtatagtcgaattcgatgccctggccgatgcggttgggaccgccgcccagaatcatgattttcttcttgtcgttcacgggaacttcgtccgccgcgccgctgtaagtggagtagtagtattccgcgtgttccacgccgctgacgggcacgattcggaaggtggccgtgatgccgtctttctgccgacgggcgcggacggccttttccggcaccccgaaaatctgggccaggtatttgtcggaaaagcccatttccttggcctggcgcagggtttccgcggaaagggaatcccagtcctgcccatccagggaaaagtcaaagtccgccagttccttcatctgttcgatgaaatacggagtgatgcgggtcagcttcacgatttcctccacggctacgccgcggcgcaggagttcgtaaatctggaagaagcgttcgctgttgccgtacgtgattttttcacgcaattccggggtggagagggcttccagctttttcacgcggcccaggccggcgcgtccgatttccagagagcgcacggccttctggaaagcttccttgaaattctgcccgatgctcattacttctcccacggctttcatctgggtgcccagcttgtcggctgccttggggaatttttcaaaggcccagcgtgcgaacttcacgaccacatagtcgccgtaaggttcgtatttttccagggagcctttgcgccagtagggaagttcgtccatcgtgacgccggaggccagcttggtggagacggaggcgatagggaagccggtggccttggaagccagggcggaggaacgggatgtacgggggttgatttcaataacgatgatgcggttgtcctcccggttgtgggcgaactgcacgtttgtgcctcccgtaacgccgatggcgtccagaatgcggtaggaataatcctgaagcttgtcctgcacttcctgcggaacggtcagcatgggagccacacagaagctgtctccggtgtgcacgcccatgggatccacgttctcaataaagcaaacggtaatcttttgtcccttggcgtcgcggacgacttccagttccagttcctcccatcccagcacacattcttccaccagcacctggttgatgagggaggcggccaggccgcgggggactacctggcgcagttcctccacgttgtaaacgatgccgccgcccgtgccgcccatggtgtaggcggggcgcagcacgacggggtagcccagttcagcggccaccttttcagcttcctccacggagtagacgggttcggacttggcgaccggcacgccgatcctgtccatggtttccttgaaaatgatgcggtcttcgccgcgggcgatggcttccagatccacgccgatgacttccactccgtactgtttcaggatgccttcctcatgcagcttggaagccaggttcagggccgtctggccgcctaggttgggcagcagggcatccgggcgttccttctcaatcacggccgtgatgcggtccacggtcagaggctcaatgtaggtgtggtccgccatgccggggtccgtcatgatggtggcggggttggaattcaccagaacgacgtcgtaaccttcggcgcggagggccttgcaggcctgggtgccggagtagtcgaactcgcaggcctggccgatgatgatggggcctgagccgataatgaggattttgcggatatcttcgcgttttgccatggtatgatgcctctatgtggtccgtggtggttaaaaataaatgccggaaacaaggtccgcccaaggtgcgttgcctctccgctccgcatacccggcgcgtgacctgacgcacagtacgggacgccgggcgataagtccagacaaaacaacaggaattccggggaaaaggctatggccttctttccttttcgtacagtgccgcacgcaatccgcccttgatattttccacagtccgtataccctgcggagcaaggatgaggaacgccctgacattaatttgctgtcttggattgctgtgctccgcagcatcggctgcggacctttcttccacggggagggggagcgccgtgccttcgggggcggcttcctggtaccaggccctgcggaccggactttcccagttccggaacggcggcggctacgaaaccagcagggaagccatgcaggcccttgcggagaaagcctgccgctgggacccccgcacgcgccgtcccgtttttcttctccgtaacgccacgccctccttctgttcctccgcctgctacctgctccttttgaaatccctgcagatatgggactctgcacagccgcggcccgttatttccgaacgcgcgtggctggccctcatcccccgcttcggccagcatgacggggaagggccgtggggatgggcgaacgccaatggccccggcctggccgtcctggtgcacaggctgggagccggcatcaactttgaggactggaggaaggcccgtcccggcgacttcatgaaaattttctggacggaccgcatcgggcgccgggaatccggccatctgaccgtcctggtgaaggatggaggggaccaggtaacgttctggtcctccaacattccggacggttacggagccaggacggtgcccaaatcccggatcaggcgcgtcattttcacgcgcatcaccaggccggaacggttcaacctggccccctccgtgggaagccacccgtggctgtcctccctgctccggcaggaagtgggcatgaaggaagtgcgcaggcattccggcatgcagaccccctgaccgtttcccgccgtgaaaaaatgctccttccctccttccgtcaccccggactgttccgtgctggtgctcggttccctgccgggagacgaatccctgcgtcaggcccagtattatgcccatccccgcaacgcgttctggaaaatcatggggtcccttctggggttcgatccctccctgccatatggggaacgcctgtccctgctcaaccggggcggggtggggctgtgggacgtggtggcctccggcgtcaggcccggcagcctggaccagcacatctcccaggaacggcccaatgatattgcggccctgctggatcgcttcccgggcatcggcgtggtctgctgcaacggcaccgcttcccataaataccttaaacggtattttcccgaactgttccttcgggaaacgctttccgtcattcaaatgccttccaccagtccggcggcggcgcggctgacgtatgagcagaaattccgcgcctatgaggaaatcatggcgcccctgctccggaaggaaagggaaaaatagagaccttctgcgccttttccaatgccgtgcgcggcccgacggtaacaggcggggttgttcgtcagcaggacccgacggccgccagcaggtggacatccagggccagggcttcgtgaatattgaaattcaaatcatcacggagcctgttgagggcctccatgcgtttcagcaattcgttcacgggcatctgggcggccagtgtgcgcacctccggatgaatcggagcgacttccggggctccggaggcaatcagggctgcctggccgaaccagctgatgagcagttccagggcctgattgcgctgttccagatattccgtctctatctgggcggcattcgcgtccttattgcgggcctcccagtcggaggcgtccgtaccctgggctgcttccctggcttcatctttcagagcctgattcaggtttttggtgatggcggccttggcctctgccatgacgtccatgaacctgctgcggaaggccagagcggccaggtcattattcagattgcggcaggtctccagccagtgcgggagcagggcctcctgaataggagtgagcctgaattctccggattgcagcagattgacgcgcacgcagcgggaaataattgtctggagaagctgatccggctgggaggtggacaaaatgagcagacactggccgggcggttcctccagggttttcaggaaagcgttggcggcctcgtcattcatccgctccgcatccatgaacacggctatcttccatttcccctccgccgcgcgctgttgcaaaaagggttccacggcgcggatatcatcccgcaggatgcggcgcgacttggacttggggcgcaccagccggcaatactcgtcccttacactgtccagatggtctgcccggatgccgtttatcagctccagcagttgcaggatcaggcgggaggctccctgatgctcgtctcccacgatgagcagggcatggggaagccggttgcgggagaaggcggtgcgcagcagatcgaacgcttgggatgccgtaaatgccatatgctcctatgaaaacatttcgttgcgtcagggcaacagaaaagattggtatatgtcggatatttcatgtactaagggggccggttatggaacaaaatgacatctcatcccggattgtctttgccgaccgcggcaaggtgaatgtggaaaaaggcgtggaatttgcccccaaatttgaccagaacggcctgattccggccctcgccatggaccatattacccatgaaccgctgatgctggcctatatgaatgcggaatccctgcgcatgaccatggaactgggggaagccgtctactattcccgcagccgtcaggaaatctggcataagggcgctaccagcggccatgtgcaaaaagtaaagcaaatcctggttgactgtgaccaggatgccctgattgtgctggtggaccagtgcggcgccggagcctgccacaccgggcaccactcctgcttttaccgttccgttccgttcggcgatgaactgaaagcccagccccaggggggggccgtcacgctgcgtgaagcggacggaggcgtcgtttttgatgccgaagccgtgtacggcaagggccattaactccttttgcgcgtcaatctgcgttctccgggttgacgcgccctctttttctgctgtaaaatcatgaatgtgaaaaaactgtttctcatgatggctgccgtttccgggacgctggccctgtgccaatgctcttcggaagcgcctcctcctcccggaaccgtccgcatggtggatcagcaggcgattgccctgatgcaggaagccagggcaaaggaagcgaagaatgatctctccggggccatcaagaaatacaggcgcgtggtggaaaaacaccccctttccagggaagctccccaggcccggttcagaatggcggaactctatgaggcccgcaaggaacctgcggaagcgtttgaccagtaccagaaactcattgaccgccacccggacagccccctgtacaggcaggccatgtcccggcagaaggaaatggccttcggcgctgcgagcggcgcgctgaccaaccgcgtgctgtggatgtttgatgtcaggatggatcccacgaacgtcacggaatggctgaagcatgtgcgcgacaacgccccgtatgcccctaccgccccgcaggccatgaacgtgctgggcaattacctggccgcgcgcggccggatgaaggaggccatagaggcataccagaacctggtggacaattaccccaactctccgttggcccccacggcccagctccagatagccaccctgtatcgccaggctgctgcggacggagaccgcaaccacgtcaatgtggcccgcgctcaggaagcgtatgaagactaccttcagcgttatcccaacagcgcccgtgcgggagccgcccgtgccgatctggcggccatgaagcgtgagctggtggcccagcagctggaagtggcggaatactacctgaccaagatgaaagatgcggatgccgccgtcttctgctaccaggaagtagcctccaaaggcagcatcaatcccgccgccgccgccagggcgaaggcccgcctgaaagaactgcgcgtgaccagcagataacaggaactctccgtcctcatgaatcgtatccggaacgttttcaaactcttcctgcccgttttttgcctcctggccggttcttgcggctaccagcttggcggcaccaagccgcccaagctggaactggcccagaccgtcaaggtatgcctctttgccaacaactctttggagccccgcgccgccacgctggtgaccggcgccttggcggatgagctgcagcgggacggcacctaccggttaagctccggcgcggatgcggatatccgggtggagggggaagtgtactccatcaccttcgaccagttgcgctccagccgggaagacacctacaaaagtacggaacttggattgcgcctgtctgtcaaataccgtgtggtggacgccaggacgcaggaaatcctgtatgccggctctgcggaggaagtaggtcaattctttgaccagggcaacattcagtcggcccgcacgaatgccctttcctatgcggcccgtctggtggctacttccattgcggaaacccttaccaatggctaatcccgcccggttcaggaaaatttgtgcttatggagaaagtggaatacagcgtttattttgttccggtgcctatcggcaaccgggcggacatcaccctgcgggcgctggacgtgctgcgcaaggtggatgtcattgcgtgtgaggacacccgccattccggtcttctgctttcccattatgaaatccgcaaaccgctgataagcatgcatgaccataatgaacagccgcgcgccggggaaattgcggcgcgcgcggctggcggagaaagctttgccgtgatcagtgatgcgggcatgcctggcgtgagcgatccgggctatcgtctcatccagaccctcaaggaaaagggagtaagcttcaccgtccttcccgggccatctgccgtggtgacggcattggtggggtccgggctgcctacggacgcattcttcttcggcggttttctgcccgtcaaatccgggaaaaaaaacgctgtgctccaaacggcagtggaagcttcccataccagtattttttatgaatccccccatcgcatcgtcaaaaccgtgcaggctctggcggcgctggatccggatattcccgtctgcgtagccagggaactgacaaaaacctttgaaacttaccatcgcggtccggcctcccggctggcggcggaatttgcggaacgccctcccaagggggaaatcgtgctgctggtgggcggcgtcaatgccccgcgggctacccgttgacgggccggaaacatcatgtcaatagctgaccgtcactttaaccgggcggtggtcggaggcggcgggagcttcaattaccctgcgttccttcacatggaacgcctccgtcttttttcccctgtacatccagatgtaatcaatgcattccttcggatgcccggcgggaaacgttttttgggccggatcgctcagcaggatgaaatatttcttcatccgggttatcggctccgaatccggcgttaaattgaaatcccctgcaataaaaaaaggcttgctgcattttgcggccagggcggcaatcatatcaatggaagcgctgctgtcttccctggtcagggacaaatgcgtgacgcaaaaccagtaatccctgaactcggccatcaacagcacacgggcctcctccctgccgggcaaaggaatccgtctgacgctcaaaggcttttccctggataaaatgcctactccataggaaccgcctgaataatcaatggccttggcataggtacccgtcaacgtcgtccttgtggccaattcctgcagggtatccctgccgccgctcctgattgtcccctggtccagctcctgaagggctacgacatccggtttttcctccgcgattacccgagccgtgcggtcataatccctcctgccgtccatgccggtgccgttctttacgttatagctcatcagcgtgcattctccggcctgcaggggaaaaaggttcagaaaaagcgctgcggctgcacataacctgaaaatgaaccgtttatttcctttcatctctgtaaaaagcttcgtattgctgcccgggctgcaggtaatacgtgttccctgttcccttttcttgcagagaatcttttcttcttccggataagtaagtcctccggagagaaagggcggcaactcatttccggtttccggagcaggcctcattcgctgtcggctccttcacctttgaagatttttgagtcatatgccggcagaaaatgacgcaaattttatcaacttgacggctggaagtgtgtcatgataatatcctatcatcatgctggaggataggagatcacgttcctcgcgcaagacaccggatttggtgactgatgagcttattctcattcttcatgaagcgggcatgctggaattcaatgacatttttcagcgtaccgttgtcgtgatgaaggcaaagcacatgtccctgggcggagaggaaatcctgaggctgaggatttacgagaaactccagaatctggtgagcgccggcggcctgatgaaaaaaggccgtgaatatacggcccttcccaagctgatggccttgaaatcatcggcgggcgggggcgggttggggtaaccctgattcaggaaaggcatgggttacggtttttctgaaatgggcctcctgtaaaagagaggcgcttttccggaaaagatcagggtttcatcaccccttcctggaatggcccgcggcagtcataagggataatgaggagcaggttgttaatccgggctaccattttcttctgcttggtttcctggatatggaataggtggacactgtcatttaaggatcgcagatacttgaacgtcatgcattctccttccatccggaattctttcggatccttaatttgaacagcgcctgaagggaagccccatgtcccggtgatgtcctggagttgctgtttctcctcataatttcccttttgtaatcccttggcttgtttgcgtgcccagatagccgcttccaaatggccggaaacaccccattccctgctctttttttgcagggcctgagcgtattgccgggtcaatttttccttgccggttgccatatcggcatgaattttttcagaaagaaggtcgaattttgggaaagatgaagaatcggcggagcgattcgcttctttctcgcgcgctcccttccgctttaacagggaaaccagtttggtagcgtggttaacctggaaaatatggtcgtcgcggtccgttttaacccagtagaaccataccgtccgggtttcattgagcctgatgatgtcaggggatgaaaaatccttgtccactccgcctttgcccagccatccggtattgccggacttctgctgtgcctgcttcccatcaaagcggcttaaataaacgtatcctcccgccgtttcttcccattgcccgatgaaatgagagtagtcatctttttcctctttctgaatgccgggcagggccttccgttcgagaatatccttgatatgcttggcctgttcaaaatcctcgtttttgacgcattcattcatgagcctgaccagctccggcttatacttggcaaaagccgcgtcgttgattttcctttcctgttcctgaaaagtcagttccagcatccttgcctccggcggtatttgcgctgaagccggaatggtaagaagaatgaatgctgcagctcgaataatattaatggctccgcctgtctgggaaaaagtgcggaatagctttgcgatattcatatgtatttaatatggtgatggttggtagttttcgtccgcttagagaccgttcatcttgatgatgtccagcagttcttccagagtgcggcaatgccgctcggtgttaccgcagtccaggcggagcatgttaaacagaaaccattggctgttctgttctctttcatcctcttccgtcagacatgcggcatatgccgctctcagggagtcctggaaactttcccattccttctgcgccgccttcaatttttttgctatggctggagcatgggagtaatgctccatgagggccgaatgcgctttatggagccgttccgtccaatatccgagcagctcctgacgcacccagttggcttggcgccccgtaagttttccgctgtcaagctggccgagcaaagctgtcagttccggatcgggagttttttctccatccagcataatagttaccggaatcccggtgagattttccgcttcctgtttttgatcgcaggtaagatagccctgaagaatccctttgtaatagcaatagcctcccttgtctgtgaacgtgatggtggccggcttcgggttttctccctttgccttctcataggattgttcccctgataaataatagtgtctgaacagggatggatcctcttcgtacatttccccggaagaatgattctctttatgcttatcacaataagcgacaatgatatgagcggttttccctttaggcttgtatgtaacgattttgtcttcactcccctcccaggaaaggccgtcctttaaattcagaaaaatctcatgatgcaaattcttatattcttcctttcttgcgtgaatttccagcgatgccccttccagggacggaggagattggacgtctccggcaaatgaccggctccagcacaaggcggcaatgatgagaaaagagaaggaagggagaatatccattaattgaaaaagggtaaatgttttaaagaagataaaattttatccatattcagacagggttgtaagattattgaatttatgaaaatacccaatatcgccagggtcaatgatttgtgattggaaaaagatccgttctgttcatatttgatgcggcccaatgcaaaacaggcaagtaccgacaatagcggaatcgcataaggccatcgcatgccttcaaaaagataataggaattcctgaaaagcaaaatagacagccatgaaaacaggatgcctgccatgagcgcaaattcaaatcgaacggatttataatagaattttgtcaggaaaataagaagataaaagctgaatatggtggtaatgatataataggcttctcctctgtaggatgtttgaagaaaccccatggccccgccaagggacatcgctgacaataatattattgtcagcggattatagtggatcccggaaatgcgtctaaagacaggtccgtatatggcgatgatgagtagcgtcacccctgatagaaggtaggccaaattgacgaaggcagtgttttttgcggatgggaagcagtcgcccatgagcagatagatggcatagggatccgaaatgcaattctttacatcaatggctattccagggataagcaacgcgaggataatgaataaagaaaccagggaagaaacagggtgtttttgaatgggatagatgacgtcgtaaaatgaatttttataagaaaagcttcttttccaggaattgtttatccattttccctcctcttttcttccttctggagagcacatgactcccttgccttgcaacccttcttccgtatcgttccatgtgccttcatagatatggccgtctttccatgtcatcgttccatggccttttctggaggtcccgcaaaaagttccctggtcagtccgttgctgtgttgcatggtaaaagatggcttggcctgacaggttgtcgttctcccatgttcccaggacccaggagccatcatgaaagtggtaggtccctttcccatgtcggcatccgttctttagttctccgtcatagctttctccatgagcataggtctgggtattgttagagcagccgcttttttcagaggaagctgtttccggttttatagagatgttcaacataaaacgtgggattattcaggcttttgattaaaggcaatacatccggcctcaaatgcctgccagacgcatgctatccaggcaagcggtccgatgatggcggctcctatggctagaccgattccgagcgctccaagccgaagcccccatttttccatggaagattccaggtcttcgccccggatagttgctctggtgccatcgtcgaatacaatgcttttaccttcaagagaatttgcgtatttatcctctgccctccattcggccattgtttcttgaatgacgctcccggaagtgtcctcttccgggaagaaccccatggcctttcctatgccgagggtaatgccgctgaagatccataacagagtcatgcttgggaaaaagccttccgtcatgtagccgtagatggttactaccaggcatattcccatcagcaggacaatgaccatgggagcaatattttcaacattcggcttcagcgttttcctgcaaaaggctacaaggtataagataaaggctatcagtgaggagacaatgatgaaggcgatgatttcttccgctcgtgtcagagaatctcctcccgtcagggatttttgaatgatggaggcaacatgatgaaagacatccgacaagttttccgattttttcatggggttttcaatgtatggaaatctataaaatggcagttatttagttgagtattcacggtcaaagtaaatttctttaaaattcagttctcccttattatttataataccttttttcatcagaaaatctacgcctaatttataaagagctgctttcatgccattggaatctatatatcgaatttgcatgaaatctgagagacttatgcatatctttttttccttttggtaaacggcatattcagcagcaacggctagaccttcttcaatagctttggtagcgcgtccatctttatccggatatgatgatatattaattgtttgcttgtttcctccaatctctatatctgttttaaaattttcctttaataattcattagcgatattgttaatgaatcgtctggagtaacgaaaaaatattccatgtcctaatacttcatgagcgatcagtgacaatcttgacttaaatcgttttttatcttcaaccatgtttgtgagaaatgttcccgttgatatatttaatatccagggagtagaacgtgagaattgcataggaacaagactagatgagttatctgaatagaattgatgtttcagattaactttaaattttaaaatatcacctttttttgatttaatattgggtgggagattttctgaatagaagtcccatgccttatccacataataagccacaagctgttcctgctcctcgtgagtgaagaagcatgagaagtattttgtgccgaaaacaaacgccatagcattgaaatcgttaacggcttttctaactttttcgtcattccatgcccgtgaacgtttaaccttgttcatattaaaggaatagtctccgtgaccatgtcgttcaagaatgatgcgcatggttcctttttgatgctccatgccctgtattttcagtctttcgctatacgcttcccagtcgccgcagatggtggcattgtccggatcagctttcccatgaataaaatgttcgtatccttctgaatcgtggatcttcccctccccttttcgatctacccggcgccactggagttccatcggaccgtctttcccggatcggttccagcgtcctataaaggccctggatacgctctcaaaagcgccataagtctgataatcggatccattggcaccagcataccaaccggtaacgtaccctgtctgattattgtccttgtcagcttgatgaaggcggatgacaaggtaagaccaggcaattcccctggagaaaaaattgttctcatctaccgttttgttgtgcagcctgctgtatgccaggaaggaagctgctacaggggtggtgatcttgttgaacgcgtctgggatatcggcgggaagcgaccgggttttgtccaagaccagcgtgtcaagttcggatctttttttgtcttccgcaaaatcaaggatagccttgcctaaggtaaatcctaacccttggggggccaaccagggcaggagaatatcatatcccgttgcctgtgccgggagtagtaaggataaggccaggcagacgctcgccaggatggttttcataagatggcggtattttatcgtttgtgggttaattgctgggcttcttgttcaagctgttttgtgatttgctgaagcaggatgattcttttttctctttctttcgcggacgccagaattttatccaggtacttttgaaagacgccgtccgccacagcctgtctgcggccggctatttgccggtgctggacggccatctcccggaacttttctatggtggaagggaattgccggaaacgtttttcatccactatccgctggggaatggttttctgataacgctcttcctgttcattgaagaaggaaagttcccgatccatggagcgcgtttcgctgcggagcgtagtgagggcgtaccaggaaaggccccaggcggacaggcacagggcaaggaaaagggtggagtaaatggtcaatctcttcatggcgttcgataaatcaacggcttttttcctgtaattcgttctccagggaggaaatgcggttttctatatctttctggctgactcccgccgccctgagcgcgcttttggcgaactgcatttccgcctgggcctggagcagtacggtttgttgacggtcaatctgttctgcgaggttattccaggcgctttcatcttgccatatttcccgtttgatttgggaagtttcttctttcaatttggccatttgctgttccgtgagcgccatgccgatggatttttcctgccattccagctgcagggaaaaatgccgcaggcggattttacgggcgtgctccacctgggcgcgcaattccccggaaccgggcagggctttgctccatcgggcgtagtgctggcaggtgtagacgataagagtgattcctgcgatggcgcagcatccgctccacacgagcgcggggatggataagcggggcgtgggagaaggggggggatagttcatggttggatggtttttgttgagggtgacggggtgaggccgcagcggcggagggcttcttccatcgtggcgttttttttcaggagggagcccagccatggatccgttccgatatggggagcgtttgcgaaagcttccggcctggtaatgcgggtaaagaggacgtgtttgacggttgatttggggatggtttttgtcccgtagcccggcgttccgccagggttggactggttggaggaccagaaggtcaggctgttttccgtctgggagaggtagatggtcaaatggccgcgttccttcgcgccgacggcttccgtccaccacagtttcatgatgtctccggagcgggctttttcccattcggtgaagctgtgcccggctcccaacttatggatcaggacggccaggccggggccgttggcgttggcgcagccccaggcccccgtgccgtccggggcttttctgggggccagggtctgccaggcgtttccgtccaggccgtttttccccctgccggagttccagagctccagagccaggagcagcgcgccgtaaacggcggaagaacagaaggaaggccgcgctttcccgggctgcagccggaggccttcctgttcatcccgggaaaacgcccggatgaaattgtccagcgctttgcccgtgcaggcatatccaccgccctgtcccagtttttccctggcctccgccatgcatgcctcccatgtttttccctgtatggcgggttgggggccgggagccgccccctgcctcttatccgaatcttttcggaagggccataaccaggcgcaacgcagcgcaaacggcgggagagcggtggtgaaggaggttgttcctgttttgcctgatatggctggccgggcggacgcctgcgcctccggctgcgtttccgttgcgtggggggatgcggcggagaggaacaggaggcaggccacggagggaaaattcatggggacggttgagggcggttgcccggaatgctccggcattccggggggatgagtgtgtcaggagggggaggaattctggtaaacgagccgtttgtagatggcggcaataagtcctacgcccgtagccggaatgaggatgatcgccagaagaatggcgataaggcctaaggcgtctgcaatagctcccaggatgaaacccaaaataccgagaagaacgccaaggctgaccagaagggccaggaaaaggatgaagatgaggaatttgttgccgtaggtatatttattgctgagcgtcagcgcttccgaggcattgcagcctttgtccagcacaagcatgggggctaatgaccaggaaatgaggatgacgatggccggaaatccgcaaaataaggcccctgccaggatgccggcaagcatcagcccgccggtcaggaaaaaattccccgaagaactggcggtaacgtttgtcgaaaataaaggtgggggagatgggcttattccggctcagcgcaagaggcatcgtacacagggcgatggtggtgccgatgttgatgtacggaatccagagagtcagtatccagagcaggatggcgagaacaatggaaagggcgtttttaacggcaatggaataggcatccagcaaagtgggcataaattccttctccataaaaccgggagcggcggatttagccgcctggttcattccgatgtagtcgtccagaccgttgtcgggagtctgggaagggtgatacgccggcctgttttgttgccggggaggggcttgccgtactacgggttggcggcagggggccgagccgtttccctgcgggcggagccccggctgttgaagcggaggttgcccggaataaggggactgggctggacggccgccttgttggggaggcatggggcggttgtattgctgagttgctgccgggcgtgtttgtcctggccgtccctgggagggagggaaggctccggcatgatttcctgtagcacgggaggcggatgtcccggggaatggtgtccgggatggtgaggggtggggggctgctccttcctgatggggcggcataggacggttcgcccgccgcgtttcctgggggacgggattcggttgtccctgtatggaatgccggggcggagcggccatgttcgcctgtgaaatggtgtccggcctgttttgttgctgtggtgtattcataaatggtaaggatggcggcaagcgggaacggcagagttccttgatattgactgatattttgtctggaaaccgtgtttcccggaaagttttactcggacagttggctcttcaggtccttcagccgttcttccaggaggcgcagttcttcttcgctgttcaggatatcccggcgctcttcatcaagccgtgaaagttgttgccgcaggtattccattctggtgcgaatgctttccagagagttcgattgttcaatggtcttcaggtctttggccagtttttttgccagttcggctttttcctcagataagctcctttctgcctccagggcctgccggtattcgacatccctgccataataagtccggatgaaccatccggaggaacccagagacagaaggaagccggcaataatgatcagaatttttcatgacggctgtttctaataattcattttgagggatcggtagccggctgtggcgtccggggcttccctgctattgaggacttcattccactggatgatttgcccggagggtgaagtctgccatatttccttagtatacccccggatggtctttccccggtaattggagcattcgtaaaagtaaaccagctcaatggtgtttccggaataagcaactttcagtaagcggtagtcgcggatgggccatttgtcccaaaacttctgaatatcattcataatgaattcgttgtccacttctttcccgttggcgtacatatagttgctgcgaggagcgaacattttggaaaggctggcgatatttcctgtctggcgggctttcaggtaagctattcctctctcaaccatttgcttgtcaagatgggaatcggaaataatcggagggggctcgggaacttgaactgtacctggtcctacgggcgagaggtcaggaacaggggaagtagagggatgaagggcaagggaaggcgttgaatgattttccggtttatggatggggtcgggtgctttttttcctctcttccagaacatcaatagcctgttggacatccttcagctttgacagggtaggtaaatgttcctgcctgattttttcaatttccttttttttcgcttccagggaagtttgaagctgttctgtttctttgaatgcctgggcaagggtttccgccgtttgcctgaccggatcatactttttccgtagaagcgctgtttcgtcagtgagtgcgtaaatatcacttttcaagaaattggcccgtttgatgagtttttctcctttatcgtaaaaaatgtagctcagcactcctcctccaatcagaaggagcgtggcaatggatgcggaaatcacgatccctctgtcaatagggccggttttttgaaccttagagagagttcccagaggtgaagggctggaatcttcttcctgcggccagtcttgctggggttcctgttgccagtcctgctggggttcctgttgccagtcctgctggggttcctgttgccagtcctgctggggttcctgcggccagtcctgctggggttcctgcggccagtcctgctggggttcctgttgccagtcctgctgaggttcctgcggccagtcctgctggggttcctgttgccagtcctgctggggttcctgcggccagtcttgctggggttcctgcggccagtcttgctggggttcctgcggccagtcctgctggggttcctgcggccagtcctgctggggttcctgttgccagtcctgctgaggttcctgttgccagtcctgctgaggttcctgttgccagtcttgctggggttcctgttgccagtcttgctgagaatgacgttccctgcatttctcccgggaagaagcaacgttcatgggaatatgattattcatcagtgtgagaagtatttgagtcaaatttgcttttttgaatcgtgtattatttcaaccgtttgaagcggtctgttatgaacagcatattcttgatttttccgtgggtgaaacgattggctgcaacttcaggcaatttctggtaaactcttctttctccctctgtaggattcgtgatgctgttcagaaaagatgcgccgtttggcatgtccagtttttcgaacaattcaaccgtttcctgtttttaaggaagaatgcccttccgttcattttctgttttgtggatgagaaaaccgcgggaagcgaccggcaggaagaacagatgctaaagaaccattcttaaagcttctgaattgtaatattttttttcggaaatttgttcccgaagctcgcggagacgtttttggttttgttccatgtctatcttctccttcttgtattctctgtaagcctcgttgatgagctgcgcggcttcatcggcgcttgccttgtcttccacattttccaaggcgctgacaatctctgcctgtaatattttgctggggcctttttgttcgcaggaagccagtaatggcgccaggagcgccatgcctgctccggcaaaatagagatgatggttcataacgtaacgggattggtaaatagatattaattccgaagagtttcctttaatttttcagagttgtaatagttcttttcttccgctttcctgatgagttttttgaaattaactttcgtacggaaatgttcattttcgtatttccgttcattgaggtcgatatctatcaatttcaaggcggcggcgtctgcgctttcttcgtccacaacagattccagaatggatattctgtcttcaatgaattggttttctttatcctttctgcatgaggcaagaaagaatgttcccagcaggagcgggatcagaatgagataagaggttattttcatcataagagttaatgtaattcgtgcggaaattgttgttggagcatgttttattgtttcgcagggctactccgccgtaaagccggtgggcgtgctgccagcgccctcggattctacgctgaaagttggaatttctcccttttctgtgggcgggctttctgtaccgtttttcttgattcccgtttttctggtaacggctctgccgttgatatgggtcaggttgaaagagaaagagcccccgcggaggtaggagcggtaatcattggccgcatgccatttgccgctgaggtaacgacggttcccggaaatatggcctctgtaggcgatagtggttccggcggaattgcccgcaaccgccattttcgcgctgaggtaggaatcccccagagaggtgaggtaaaagataatcctccggtcgtcggccctgccgccaatgcttccgcaggaatacggttccacggcggaagatgacgggatgctcaatttgcctgaaacggtgccgtccctatattccttcaaggtcagcatgcgggctccggttctgctgcttgtgccggagacggagcctctgtaagtgtattctgccacgatgggggagcaggaggccgcagccagcgccagcagcgccgcaggcagggcgtggatgaaaaacattttcattgatgcagaatgcagagggggagggatggaaaatcagggctggaagacgttgtctgataaggcttttctcagcccataagatccgtaatagtcctttttgaacagggtttgtttcaggggctccttccggaacaggattttgccgtattcctccttgttccagagcttcttcttttcttcgtcgggcatggatttctccagttcttcggatttcttccggagatcggcaagctttccggcgtatttgtccgcgctgtcccggtccttgatgctttccatgagttcgatcatttcttcctgcatgtccagatactgttccgtattgttcttctggcaagaggcggaggccagggccagcagaacggcgccggcgacagatattgttttttttatcataattgtgaatggttgacagttgacgttgtgtttatttgcctcttccttttgagaaagcgttgcgcagtttttccgagccgtaatatccctgatcgcgaagccgtttgctcagctttcccatttgttcccagaagggacgccattgagggttatccttcagtttttcttcttcaggtgtattgtttattgtattaaacagattgaaaaactgattcatgagtttgtccacttcgtcagcgtatttgtccgcgctgtcccggtcattgattttttgcagggtctccaccagttcggtttgagcgttcaggcataaatccacgtcgcttttctggcaggagatggtggttaaagccagcagaacggcacaggcggcgagtattgtttttttcatcattgttaatgaatggttgatggttaggggaaatgacgctccgaggatgaggatgccccggcacggtatagttattgcgggttggggggaggatctgtaggatacgttgagattgacgctctggtttgttcgctgcggatttcaagcgtgttctgagcgcccgccagtttctgtttagaagacctgcatttgcgaatagcgaattcggaatccgtataggaattcctgcgtcctctttgtcatcaaactgtttggaagagaactgctgatatgacggtgcggtgaaacatcatcaatggaattgccgaaccttttgattaataaacgactatttttacttgactacggattccgaaaccgttgcaaaatagatgaaatgaaagaggaaatttcagaaacggatcatgcggcgctggccattttaaaaaagacagggttggatgtggtggaagccgcccagctggcgcatgaattgctgcaagccagcaaggggcgcggcagccgatggaagagggcgagggaatgcatccggctgggagaggaagccctggttgccagaggaaaaacggtagtgttcaggaaagccgtggatgaggctatggaggctcggcaagatcgcaggaaaagaactagggatgattttcgttatatcagccggcgtttgttgaggttttgtccggaaatagcccgaaggcccgtacgctttatcacgccccgggaatgccgcgcctgtctggaaaaatcatttgatacccttaggcagaggcataaggcccggttggtgctcagcggtattttcggaacggccgtgaaacgcggatggtgcacggaaaaccctgtggcgcatgtggacctgccgaggctgaaggagcattccattcccgtgctgtccctggaagaaatgcgccggttgctggctgctgcggaagagtatgacggaggggcgtgcctggccgcggttgggctgatgctgtatgccggcatccgcccggaagaagtgagaaggctggattgggcacagattaatttaagggagggaatggtttccctgagggcgcgccacagcaagacgggaggagcccgcattgtgacgatccagccggttttgggaaatctgctggaaagagcggttgctatgggatctgtgtcgggaagcgtatgcccgcgcaactggccggcgaagtggagggagctgagacggttggccgggtgggacgggaaggaaaagaagtggcctgcggatatgttaaggcatacgtttgccagttattttgccaggcatttcaagaatttgcatgtattgcagatggaaatggggcatgcttcttccgatttgctaagaaccaggtatttgaatatggaaggcattacggaaatgacggctgccgttttttgggggaactgccatgcagggcgccacgccattaaaaatggccgcccctgaacagaagcggccagctgttgacgggatgatgccgtccggcaattagaagttggtgcggaaagcgatattgtagctccatccggtaaagcctttctgccggctggcgtccgtgccgttggaatgggcgtattcgatgcccgccatgatcttggccatgttcgggctgcattcgaaaatgtagtagttgacgcccaggtacagggcctgcatgcagtcggaagttccggaataagtggagttctgcgtatagcgcttttcccattttacggcgttgctgcccgccgccatctggtagcggaccactccttcccagtggggggtgaacttgtaggacggcatgacggtcacgccgaagacgttttcagcccccgctttcatgccgatgacgttgaagccggccatgacttcggtcatcagggagaagtccccctcggaaccttcccaggtcagggctaccacgtccctggctccggtaccctggtatttggatttaaagccgtaaccggtcagtttttcatacgccttgttttgggcgtcgtccccccacttggtgaaattgtgggcgtaatccagccacagacggcttttcttcaggaaaacgtcgttagacgtgtcatagctcagcgtgccggtgatgaagcagttgtcccgggaattgaaagcgggttcaatgcggttgttgaacgtgccggttccggtgcccccgttgccgttcagccagacgcctgctgcccagccgagcttatcctttttgtcggaattgttcacctggaatccgtaattggtttccgagcggagctggttgaccagcatggagcgttcgatagtcagaatggcggaggaggatgttcggtattccccggtgatgcgcggctttattttgccgatggcataggtgacggggcctcccttgtattccagattcagttcgtaaagggagtaggtcaggtcggaggtgtcccatgtgttggtttttgcattgtagctttccaggccgtccatgccgccgatgttccagacgttgttgagcttgaagttgttcagaaacttcatgttgaacccggcgcggaagcggcgccattcatcgttgaagcggcggccgttgccttccttttctcccatgacgcggccttcgccgttcgggtcaatccagtccagtccgtactgcatgcggagggaaacgttgaattcctggatgtagggattcttgtggtcccgttccgagttgaaccacttgaaacggtcgccgagccatttgcaggcggaaaagttgtcgcgggccggcagggagtttccggtagagggagcggcagcggcaaaggcggaggctccgagagtcatgaggccgatgacggggagagtataggtcttcatttgttttctatggttggtttgtctgtgagaaggtcttccggggaaggttcttcctcacggagacggcttctgtctatcaaaccagccacaggagtgtccaaggcttaagggtgacaaaatagccacccgtccccctttggcggttacaaggtcatgcggagccatgccctggcgtccagggcgtctgcggcggcggccacttccgcctttctcttgctggccccggaaccggctccaatggcgtgaccatgccagaaaacgcgggattcaaaacggttttcggcgtctctcggccctttttcttccgtttcataggaaggagtttcgggcaggatgtcctgaaggatagcctggagttcccccttggggttgatttccttgggatggctggccgcggaatccagagcttcatggaggacgcgcagggccacagccttggccgtttcatagttggaatccagggacatggctccgaagacggattcaaatgtgttggcgatgatggaatttttgctccgtccgccggcccgttcctccccctttcccagggcaatgtgtttatccagccccaggataaagccgtatttgcccagattggcgcggctgacggttcgggcgcgcagctgggtcagttccccttccggggattggggcatgtggtggtaaaggtactgtgtgacggccagctgcagaatggcgtctcccaggaattccagccgttcatacgcccggcgcgtttccggcttgctgtccgtgctggggtgggtaagggcctgaacgagcagatccggattgttgaaacggtaacccagcttgtcttccagcgcggtgtgattcatcccggaaatgctagggccgccgttccggaaatgcaactccaaagggaatctgcgccaaagagcccccctggttcaggaaagagacgtggttggaacagatgccgcaaatgttaatttgtccaaaatggatgcttttcccaatgtttgggaaatcccatttccacaatgacgtttgagggcgtatccgctctggtgaagagttccataaccctggcgttccatgcgctggtatgggctgatgctcttaggaaatatctgcatgcggttaatagaaatgccgtacttgttttttgaaagctgaactcccttgcggcttttgcccgtgggagccactggttctgatttttatcccattgaaggttccaatcagttaatgaggtgtttttgacgataggattcagctgtattcgcgcggcaggattatttgttgctccacggctttgattccatgtcctgttccatactctggcgtgatgcgcacacgcatttcttgcatgatgaatgagagtgattaatgaggtgaagaaaataatgtctggacacccgaagtttgatgcaatttccatctgtaaattatttttcaacccggagaacaaccatgctaactcccctatggtggaaagttctacgaagacccatatgggaaggtcttcaacattccggaaccccaaatcttccttgtggtgcaatacgcagtcatcaatgctgcgatcaaaagacctttgaaaagttttcagcaaattgtctttgcgtgagcgtgtctgttcagagttgccatcccgggtgattttattgaaatccggtctgtaactggtagaaaaatttttgtgggttggagcatttggtcgattttgcccagtaataagcaacatgggttcttagggcaatttcgattctttcgatagcatctaataggagcagccttagccttctgtcaaaaagataatacttccacacaaggtcaagcgttgttccatggcggtagtcatccgctttggttctgttaccctgatgatctgtttttgtttctctgaagatgtggagatatccagttaaacgatagtaattaaccgctttgaggcgacatattaaatcatctttgctggcttccagatggcgggttattagtagtttggcctgctcctcgaaggttttaaacgttttacatggaggaggattggtaggcatgggcagttcgtcggaaagaaagtaaaatggctctccatccggagatgaagagccaagtagaaaatgcagcatttttcgtgcctcataaagaagacgctgcaaccaatggctgctgctgctttgatgtgcacatcaaagcagcagcatagtgaagtgtcaacaaaaaatctttcgttccgcatgtcatagatgtgagtggacaggctatttgatgagtgggattcccgcgtcatcccggccgtcccctagctttgacatatgggcggaagggtatagaatagtttgcgaacgaacgttggagacgatgatgaagaagattgaaccaaaagagattcaggataatgccgtacaattgatcggggacgattggatgctggtgacggcgggttctccggagcatttcaacatgatgacggccagctggggcgggttggggttcatgtggaagaagcccgtggcgtttgtcgttatccgcccccagcgccataccttccgttttattgaggccggggacgagctgacgctttcctttttcagccatgagtaccataaggctctgaccgtgtgcggaacaacgagcggacgggatacggacaaggtggccgcctccggcctgacgccatatgtgacggagaacggcaatgtaagttttacggaagcgcgcctggtgctggagtgccgcaagctgtacgcggagcctctcaatccggaagcttttctggataaaaccattgtgccggagtggtatgccgccggggatttccataaaatgtatattgtggaaatcctgaacgtatgggtgaaggaatagcgtcccggaaatgccgcaggcggacgcctgttcgttgtttctgtccgcgctttttcagaggggggcaagggttccatcctccagccggaaggctggcagggggcacggagcatcgtgcagccagtccagatgggtggtggtgatgaggctctgcgcgtccgctggaagcgactgcagaaaggctatccggcgcgtgggatccagctccccgaagacatcgtcaatcaggtggatgggtgtatgtcccgtttcttccgtcaggagggaggactgtgccagcttcatggagatggcggtggtgcgctgctgcccttcggaagcgaattgagcggcgtttctgccgttcagcgtgatgtccaggtcatcccggtgggggccgttctgggtttgtccgtaccggatgtcccggtccatggaggcgcacagccgttcatacaggtctccttcctccgaggcgcggtaagcgatggagacctgttcctgccttccgccgatattgcggtaggccagggcgatatggggcgccaggagcgccagcagatgggcgcgcaggtttctcagttccgtgccgtgcagggccagctggcgcgtgtaggcgtccagctggagtttgtcccggtgcctgtgcttgagcaggtaattgcgcgttttcagcgcccggcggtagctgaacagggccagtctgtagcctggatgccactggctgcccagaaagtccatgtatttccggcgggcgtccgcgccggcctgcaccagggaaaggtcgtcattccccatccataccacgggatagctgtccgccaggtagctgcgctggtctttgcggggctctccgttgacgcggaggtccggagcgtccggcgcccacaggatgcgccggatttgccccggaagttctccgcggatgccgaaggattgttttccgtgggagaccagaggcccggtccgggctgtgcgtggggattgcaggcgcagcaggaagcaaacggcctccagcaggctggtttttccccgggcgttgtttcccaggatgatggccccctgctgcggaatctgccaggagaagcttccgtagcaacggaagtccattaatttcagcctggagatcatggggccgggaaagaggttattccgcagggagggagcggatggcgtccatgattttgtccgtcaggtgctggtatgcatcttttcctttggcgttgagttccgccggcgtgaaggggatggggtctcccaccgtgaccgtgacggggcggagcctgggaaaccgggcgccgatgggaaaggcttcatacgcaccgctgatgcgcaggggctgcacgggaactttcgttttgctcaggatgaggccgatcccgcccatgccgtcatggatcttaccatccggcgtgcgggagccttccggaaacacgagtacgcgcttgccggatttcagcaggcgtatcacgtgcttgaggctggcggcatccgggttttcctggtcaatggggatagcctggcagaggggcagagcccatttgaaaatgccctggaacagcgtcttgcgtgcaaaaaaatagatgccgtcctcataggaaatgcccagcatgggcggatccagaaagctctggtgattgctgacgatgagcacggggccgtcttcgatgagtttttcccggttgacgactttccaggagaagaaggctttggaaatgcttttgaagagcgtgtagaaaacccagtagaaagagttcatctggaggagagtttttgttggatgttgtcggtgatgaaacggacgacctggtcaatcgtcatgtctgacgtatccaccagaagagcgtcaggcgcctgcgccagcggggcggtggcgcgggaggaatccttgcggtcccgctccgcgatggagtccgtcagtccctccgcagcgcggcgcgcggccctcacttcctcggaggcggtgacgaagtacttgaacggcgtatccggaaaaaccacggtgcctatgtccctgccttccatcacgacgggttcccggcggttatattcccgttgccgttccaccagcagggcgcgtacttccgggatggccgcaatggtggaaacatggtcgttgacctgctggctcgtgagttcttcgcccagcacatgctgtccgcacagaactacggattggctgccgtccttgccgaaagagaggggcacggccggcagggattccagcacggccgccgtgtccgcagggttgatgccctgttccagcatgtaccaggtaacggcccggtacatggccccggtgttgatgaacgtatagccgaggcggtccgcgatgagcttggcgacggtggattttccggaggcggcggggccgtcaatggcgatggctggatgcatgagtgtcttctgagttggaaatgggggctaaagccgtttgaattgtagctttgagccctgtggaaatcaagactgcgttccgaagggcgttgcaaaaagagtttcactttttcccgtaaatccgttatacagcggggcatggcccagctcaaacacccgaagatggtggacatcagagacattttggacgagaatacgcgtctgcctgctctggtggccgcgtccgccgaaaagctgctgggcctggaacgcctgaacaaggcgtacgacaagatcgtgcgcgacaaggaatccggttctcaggaaaatttctttcagcttgcctccaggcatttgaacctgaagcttcagctgcgcccgggggacctggaaaatattcctaagaaagggcctgtcgttgtcgttgccaatcatccgcacggcttgtcggacggcatcatgttcggggagctgcttacccgcgtaagagaggatgtccgcatcctggtcaacgagcagctttccctgtgcggagagctggatccctggctcatcaaggtggacgtgtatgaggatgagaacgcccggcgcaaaaacctttccggcatgcgcaagatgatttcctggctgcggcagggcggggttctgggcattttccccgccggcacggtctccagtttttccctggctcacaaaagggtgacggacgacccctggaacgcgaatatcgccgccattatccgcatgacgaaagcgacggtggtgcccgtatatttcccggggcgcaacagcctgctgttccagggcatttccctgatcaaccgcaaggcgcgcgtggcgttccttccccgtgaagtgggtcgggacggccgccggacacaccgcattgtggtaggcaagcccattccgttcagccagcttggacagtatgattccgatgaagccatcgtctcccatctgcgcctgcgcacctatctgctgggcaaaagttatgaaaaaagccgccgcccccatgtgcacaaaaaggaccggaaggcgaagatggccgcgctgacctcccccgtttccgtgcaggatatgcaggcggaaatcgacgcgctgcccccggagtgtctgcatgcccgtcaggaaaatggagattgggacgtgtacgtggcggatgccctgcaaatccccaatatccttattgaaatagggcgtttgcgggaatatactttccgccaggtaggggaaggttccggcaacgcctgcgacctggatacatacgataaccattacaagcacctgttcctgtgggacaaaacgcaccagaaaattgtgggcgcctaccgcatgggggaaacggacaaaatccttgcccgctacggtgtcaaagggctgtacaacggggaatacttttccttttcccctgccgctttgcgggtgctggaccgctctctggaaatggggcgcgccttcattgttccggaataccagaagaggccgctggctctcggtttcatttgggagggcatcggccagttcatggcccgcaaccaccattaccgctacctgttcggcacggtcagcatttcccgggattacaccaacctttcccgcgccctcatcgtctcctatctgaaggcgcatgaaatggagcccgtgctggtgaatgaggtgagggcctacaatccgccccgtaaagcggatctgaagaggtcggaatcatgcatcctccctctggggctggcagatgcccaggggctgtcccaattggtcgctgatatagaagaggatggcaagggcattcccgtattgctccgccaatatctgaaattgaacggcaaaattctttccttcagcgtggacaagcattttggcgacgtattggactgcctgatcctggtggacattttcaaaacgccggagcgttccatcaagcgttatctgggcaaagacgcgtatgaacagctcctgccttacatgcagcgggagaaagaggaggaaaaggcggcggaataattccgcaggcgttttgcgtggctctgcccccgattcttaacgggctagctgaagtgcctgtaacctgggggaagggcggaggccgtttccgcagtcatttccccgatgacggtgagaggcgtttccggaaaatgctccgcggccagtcgtgccgcccgttctcggtcgccgggacggaaggtcaccagcaattcgtaatcctccccatcccctacagcctgggccgtagtgaaccccgggcgcacgggaagaagctcttcatgaatacggaacccaagcccggaggcggccgccagccgggggaggtcggttcccagcccgtcggaaagatccatcatggaggtggctacgccggaggcagccaggatgcctccttccctgacacgcggcatgaaggaaagatggtggccggtggggaagctgccgccgagcgttcccgttacggcaatcagatcccccgaccgcgccgtgctgcgcagtacggctttgcctgcctccacttctccggtcagcgccacgttgatgatgagcccgtccgcgggcaggccggagctttcccccccggcgatgctgatgccgaactgccgtgccagccgccccatgccgcggtaaattccttccacctgggagatggggcggtctgcgtgcacgaacagggtcaccagtgcgtgaaggggcgtgccgcccatggcccctatatctgaaacggcccgtgccagcgccttcctcccgatcagttccgggtccgttccgggtaggaaatgcatgccttccaccacgcagtccgttttcaggagcagctgacggtttcctgacccccggattatggcgcaatcgtctcccggccccgtctctagggacggattggaaggcatcaggggaaggaggcgggctaccagcgcatcctctcccgtctgccggatgctgggctcaggttccatacggaagaaggatgccgggatacagaatgttgatgagagtggcggtgttgaaaatgcaatgggcgatgatgggcgtccagatgctgcccgtgtattcgtacagcagcaccagtacggctccgaagattgccagggggatgaacggaaccaggctgacgtggatgatgccgaagaggagggaggtggtgatcagggcaaaccagacgcccgtgtattttttcatgatcgggtacagataaccgcggaaaataagttcctccaccagaggggcggcgatggcggcgctgaagcagataaccgtgatcaggggaatgtcgctggagtgcctcagcacggaaacaatagattgttcggccggggcgttggtggcgtgttcaatccactggaacaggcccgccttgtccagcaggaagtggatggccagcaccagcagataacctgccgccggagcgtagaggaggaccttcagggaatgttttttcaatcccagcgcctccatccggcccgtatggaacatgcgcaccagcaggacgaaggccagaatgagattcaggcaggttccgttgaaaaccttgtagctgtccagctccatgttggttgtgctgggcggagcggaagcccccggaggcgtggctgccgccaacagggcccccaggctgaagtaaagcacaatgatgccgcacatggcgatgtccagcatgtccagatggcctacgggaatacgccatttcagcggatgccgggtatcaggcgcatgattccggcggaatatgtttaccgccacggcgaggaacatgacggtaatcaggatggaagagaacagggtaatgagctggtccgttaattcattcatggaataggcatgtgtggaatgggccgcccttccagagtaccgcgccggaagaaaagctcctgtctctttagtggaaacacggtgattttccagcagaaaatgagctatctcccctcattccgcaaaaaaaatcatcaggaaagggaatgaatacttttcaaggaaaagcgggtatgctacgtttccaacggattatcgccatgaatattcaacccaaaatcacgcctgtgctggaccccggcttcgtgccggccgttctttggaatcaagcttttgaggccaaagccgccgccgattccgcttctcatcaagtggatatcgctctgacccgcaatgacgggacctgtttccgctggtccggcaagcttcttccccataccggagaaaacattgccctgaatgagacctatgtggagcgcattgtgaaattcctgctgtggcagaagggcggcaatatcatcctcgtcgccggggatgacgctattgcggacatgctggcctcccgctattgcaaaggcggtatccgcgaattcgactgggatttcatcggcaagaagatttacggctccccgattgaagtgaaaaaggtttccgtggaagaacttcccgaggaatactccggctccatgacactgggccgcaacctggacggctgccgcattggttttgacctgggcggttccgaccgcaaatgcgccgccgtggtgaatggggaagtggtttattccgaggaagtggtctgggacccttacttccagaaggacccccagtatcacattgacggaattcaggattctctggaacgcgccgccgctcatctcccccgggtggacgccatcggcggatcctccgccggcgtgatcatcaacagtgaagtacgcacttcctccctgttccgcggcgtcagccaggaagacattgaaaagactctcggcaaggtattccgcaccctccagaaggaaaaatggaacaacattccctttgaagtggtgaatgacggtgaagtcaccgccctcgcaggggccatgggcatgaacgataacgccgtgctcggcgtggccatgggcacctccgaggccgccggctacgtggatccggaaggccacatcaagccctggctgaatgaactggctttcgctcctgtggactactcggaggaaggcggagtggacgaatggtccaaggatatgggcgtaggcgccctttacttctcccagcaggctgtggcccgcctggccccccgcgccggcttccagtttgaaggaatgcccttcccggaacagcttaaaaaggttcaggccgccatggcggaaggcgacgaacgcgcccgcaagatttatgaaaccatcggcgtgcacttcggctatgccattgcccattacgccaggttctatgatatccgcaacctgctcttcctgggccgtgtggcttccggagacggcggccagatcatcattgacaaggcggaagaagtgctgcgcaccgaattccccgagctgaagatccagctccgcgtgccggatgaaaagaccaagcgccacggacaggccgtagccgccgcttcccttccggctctctcctgacgggattaatcaaatttgcgggaggggccctggctggggtccctccctgctcatattcggagggggggacggacaatccgcgccgttattcctccttccttttttctgattcccgttccgccgccctgcgttcatgattccccagcaagaaaacatcgtcaattgcccggcgtgcggacagcccatggatgtttccctgctgcctccgtacgccaacgccatttgcccgggctgccaggcgctgacgcgtgtaaaaacgcgcatggggccttatcgtattaccggaaaactgggaaaaggcggcatgagcgtggtgttccgggcggaggatgccgttctggggcgggaagtggccctaaaagtgctgaatgatacttatgccggggatgccctgcgctgcgaacgttttgaacgggaggcccggatcatggcgcgggtttcccatgaaaacctggtgcagctttatgccgtcggacgtgaccagggccttttttacattgccatggagctggtggagggcaatggcctggatgccctgattgctgcggaggaacgtgtgccggaagacagggtgctgcgcctgacgctggatatcgtgcgcgggctggacgccgcatggaatgcgggcctcatgcacagggatatcaagcccgccaacgttcttttgtcccccgacggagccgccaaaatcgtggatttcggcctgtccctgcttcatagtgaatccgacatggagcgggaaatatgggttactccttattacgccgcgccggaaacgctgttgcgaggagaggaggacttccgtacggacatgtacgctttgggagctaccatgtaccatttgctggcaggtgcgcctccccgtgtggacgcttcccagtcttccgatattcttctggagaacaagaaaaatctccctcgcctggagcaggtggtgaacgacgtttccccaatgacctgtttcattgtggacaggctgatggcttttgacaaggaagacaggttctcttcctatcccgaattgatggatgccgtggcacaggcgcaggaggaatacgcccgggccatgcaggaatccggtctcacctgggcggaacggcgcgcggtggaggcccggcgcgcacggcgcaggaaatgccgcatcatcgttgcctcctccattgctttcatagtggcgctggcgttgggcgtttggggatggacgaaatggcgggaggagggagctcctgctcccgcaactccgccttcgcccatttctcctgcggcggaagcagccctggaagacaggggggcggcggaatcgcggctggagcgcagcatccgcttcggcaaactgtttaacgaagcccaggaatccctgaaccggggggatctggtgaaagccgccgccatgttcggcgatttggcggctcagccggactgccccctgtccacatccctttgggccggtttgaaccaggttctgtgcatgtgggtgcgcggtcagttcccggaaggggtggagcgtctggaagaactgggcagaaaaatggaagcctgcggggaccctgaggaactggaacgttccagggatattggcaacctggtcatgtacctgagctccgcggactggtcttcccggatgccggggctgcgctccaattctgacctggccgtgcattattatgtgggcatggcgctgaaatcctggtactttgccgggagatggacggaatacggcggctttctggaccgggtggccgctgatgcggcggatgaccgggacaggaacgtccgtgagctggcttccgcgtggctcagcaacctggagaggtatacggaccagtacgcgcgcttgaaacgtcttcaggacatgccggaaaaaacggtggctgaagtagaggccaaacggtccgcggcggacttcctgcgggaacagatggtcagcggggaagttccttccatgtctccggcttatgccgcgctggaaggaatactggatcatttgaggatgcagtaccaggctgcgcgggactgggaggctgcggaagccgtgaaggcgtctgaaagaaaaaaggcggaagagaggcaaaaaaaactggaggaggaaaagaggagggaaattctgctggccgcccaatccagaagttatgaagacgtctgccgggaagcggagggcatcatgaaggaaaccggtgattatgagaaagtttccactgtttatggagaggcggaaaaagtcatttcctctcctgcggtgaaagcccgcctggccatgcgccgggaaatgacggaccagatgcttccgttgttctcccgcatggagagacttttgcccgcactgctggaaaagaaaccggggaaaactctggtgctcagagatggctccagggtgcgcctgaaaggaatgaaggggcatctgctgaccgtggagcctcaggacagccgggaaggaagcggtgcgtaccaggtcagttggaacgagcttccgttcaactccctgcatgctctggcgcgggaatgccgccagaagcagcctgcggaattttcttccctggcggatacgtattccaagcctttgcttatttttggcaggctgacgggaaccatttccgccgcacagcaggaaaaagcattgcttcagatggaccgctctttcattgaaaaatggaatttatggatgaacagtctggaggcggaggaagggctgccgggagacgatggaaaatcaagttgattcaggaagggaataaagtcccttgaaaggcggcggattgctgccgccggcaggtttctgcccccgccgcgtgctttgccggctgcccacgggctcgaaaaaaggaaaaccgtccgggcaaatgcctttgttccggatttggagaaaagtaatggtgatgaagtaaaatttgcttgcctagggtacttcgtgcgggtctcatagccgcatgagactgatcagctttctgacgctggcatgcgtggccggcttcctctcttcatgcagttgtgattgtcataagcccgcggacttcgctctgaaggattaccagcctacctccagcaagcaattccgttaagttccctatatgtttgaaatccgcgaaaaaccggaaatggtggaacgggccatgctcgtttccatttacttcgatccctccgaggccggggaaaaacaggccatgctggatgagctggaagaccttgtctccaatctcggcatcggcatcgcagggaagcacctcatcaagtccagggacatgcacgccaaattcctgtgcggcaccggaaaggcgcaggaagtgaagcagctggcgctggattgccgggcggattgcgttgtttttgacaatatgctctccccttcccagcagagggaatgggaacggcttgttgacgaatgcgtcattgaccgtgaagaggtcattctggacatctttgccaggcgcgcccggactcgggaagccaccctgcaggtggaactggcccgcatgcagtattccctgccgcgcatggcccgcatgtggaaccacctggaccgccagggcgggggctccggcggcggcaagggaggcggcggagccgccaggggggaaggtgaaaagcagattgaagtggaccgtcgtctggcgcgcgccagaattgaggctattcaaagggaactggtcttggtgacccgtcagcgtgccacgcagcgcaaggaacgggagcgccaggctgtcgccacggccgccattgtaggttataccaatgccggaaaatcctccctcctgtccctggtgtccgggtctgaagtcatggccagggatatgctttttgccacgctggacaccacaacgcggaagatagagcttccccatgggcagccgctgctgctgacggataccgtgggcttcatccgcaaccttccgcaccgtctggtggaagcgttcaagtccacgctggaggaagccgttctggcggatttcctgattcaggtggtggacgcttccgatccggaagccgtgcgccattatgaaacgactctggaggttctcaatgaactgggtgcgggtgacaagcccatgatcgtggttttaaacaaggtggacctggtgccggaagaacggcgcggggccttggaaacgctgctggcgcctcatttcagcggcagggtggttcccatgtccgtgaaagaagggaatggtgagggagacctgctgaatgcctgcgtggaaatgctggaaagccgtgtccggcgcgcccggttcctgattccctatacccgcagcgacctggtggccgccatgcatagtgaaggcaaggttttctctacggaatatgtagaggaagggaccttgctggaagccgtgcttcctgtggccttttacaataaactggaatcgttcctagcagacaggtaatcccctgttcctgaagcctggggctttgccttgcgttccgaaggccgttccggggcgggaagcgtcttttccttcggagacagtatccggattcctggacgggtcaaacccggtatcccaggccgttcaggcatttcattacatccctgacaggcagtccgatgacgttgtccgtatccccgcgcacggaggaaataatcatctccccgtgttcctggaacgcgtaagagccggccttgtccatcacgtccaccagttccatgtaatggcggatgtctttttccgtcagctcccggaacgttacttccgtcagcacggccaggtttttcatgcccagcggggaacggatggcaaccgccgtacagacatggtgcgtgcgtccggacagcttccggagcatggaccgggcttcttcttcatcttccggcttgccaagagggaagccttccagaaaaacgagcgtatccgcgccgatgacggaggaatccggatgttcccggaacacggcttccgccttggcggcggcattgtgcaggcaaagttcctgcgggggcatggaagcctctttcagttcttccgtgtcccggacaataatggaaaaaggaatgccggttttctccagtaattcacgccgccggggcgattgggaggccaggatgacgggcggaatcatgggagaaaaaagcggtcatgaaaaacagggagccaatctttctcaagctccctggatgatgggctgtcaatgattgcctgtcaactgtctgcttcccatgatcctctggaaagcctcgggggaaatttcccgaatggacctgataatgtttttggaaaaggcgctcatgcgtttccggatggtttcccggtcttccgctgtatcaaattccatgcccaccagggcgcggcctacgcgttccccggtgtaggtatagttgaaataacagagggaagccagatccgcgatgcgttccatgaagtcaaggaaggcgccggcgcgttccggaaattcaatgtggacgaacagggggtgttgacacagttccggctggtagtgaatcatgcggaagcgcacgtcgtcgtcctcgctgatgtcttcgaattcgattcctttctttttcagtgtcgtgcggatggtatccaggtcttcatcggaagcggcaatgccgaacacggggtgctgggtgtttccctccgttttgccgtattgcacatccaccagcgtcgtatcctgcggaatgtggcgcaggtatttaagcacttggccgcgcttggaatccatggaaatgcgcagatagcgcgtttcatggttgccgatgcccgcctgccgggcaatctgggtaaggtgggtgaaatccatattggctccggaaatgaccacaaagctcttttcctccggctttacttcgccccggttccattgtttcaggaatcctgccaggctcatggctccggatggttccggcacgacgcgggaggattcccacatggcccggatggcctggcagacctcattattggtcacggtcacgaactcgtcaaccagttcccggcaaaggggataggttaattctccggggatgtggacggctgtgccgtcgcagaagacatccacgtaatccagattcacccggcgtccctgctcaatggaagttttcatggacgcctggtcgatgccttccacgccgatgaccttgatatggggccagaattttttcagccagcacgccacggatgcggccaggccgccgccgccgatggcgacgtacgcgcggtcaaaagggccttctccgctcatcaccacttcgtccgccagcgttccctgtccggccatggtcaccaggtcgtcataaggatggacaaaagtgcagccgtgggtttccgtgtattcatgggcggctgcggccgtctcgtcatagcagtccccatggagcatgatcttcacatgcctgccgccgtggcggcgcacttccgtctgcttcacttccggcgtggagcgcggcatgaaaatggtggcatggcagttcagcactctggccgccagcgccacgccctgggcgtgattgccggcggaagccgccacaatgcctttgtcacgggcttcctggctcaatgcggccatgcaattaaacgctccgcgccacttataagcccggatgggccccagatcctcccttttggcgtataccggggccttgatgcccggcagattcaatcgctggagaggagtcggttcgccaacggtgtagacgcgctggcgggcttgcagtatttcctcggaaagacggtccgaaagtatgctcatgattgtaatgctggcccccattctaccggggtccggcccctttttccagtaaaacattcccggggggcggcctgttttccgggattcaggttttctggacgcaaaaaagccgcccggaggcggctgtttttcctgaacaaggtggcgaagcggacggggctcgaacccgcgacctccagcgtgacaggctggcgctctaaccgaactgagctaccgctccatgaccttggatgccgtccctgccttgcggcggggacgtggaggcttatacaggcactcccatgggaatgcaagacaagaaatcattttttcctgcatgcagggttcgcttgctgggagaaacggattaaataaccggacggatttgaaatccgtaaatgatataaatgaatccagataatgattaaaatattaataatgccgattcttgaaacggacatccccgttttctctctttcccctttcaggccgttccatgctcctaaagggcttggcctcaaaaattgtcattgactccggatttcaaattcgatttcagggaatgtgattaaaaatcaaaagcctcccggatcgaccgaatcatattccgcatcagggaccggatgccccatttccacgctttttgtcttggcttacggaaacatctttggtttacaggggcaggcggcaaagcctttctcaaagcagtccgccttatcacccccatatcttttccagcatcgtggcacgcatacttgtaggcttatcaggcggagtggacagctccgtggcagcggccctgctcgtggagcagggccatgacgtagtgggggcctacatgaaaaactgggtgaatgacgaaggcatccccggcgaatgcccgtgggaacaggacattcaggacgcgctggccgtcgccaaaacaacaggtattgaattccgggtcattgacctggtggacgaataccgcgcccgcatcgtgaattatctgattgaaggctaccgcgccggatatacgcccaacccggacgtattgtgcaaccgggaaatgaaattcggcgtctttctggattatgccctggaacaggggttcgattacgtcgccaccggccattacgcccgcaggatggacacgccgcaaggggctttcatcctgcgcgggcgggacccgaacaaggaccaatcctacttcctgtccctgatgcgcccggaccagatagcccgcgccgtctttccccttggggatctgctgaaaccggaagtgcgcgttcttgcggaaaaatacggcctccccacggcacgcaagaaagacagccagggcatctgtttcatcggccaggtaaaaatgagcgatttcctgcgccactacctgccggacaagcccggcaaaatcgtggacacggaaggccggacgctcggcacgcacaacggcctgcatctgttcaccatgggccagaggaaaggacacggcgtcgcctccccgcgggagggagtcgcctatgtggtggtgggaaaggatgtccagcgcaaccgcctgattctgggatacgaagacgcgtccacgcggggattgtacgcgtcccgcgccgtggtcggcggcatttccaatacgctcgctcccctgccggcccacgtcatggcccagccccgctaccgggccaaggcggaatgggcctcctgcgaatatctggaagaaggaaaggtgcgcctgggctttgacacgcccctccgggccctggccgtgggacaggtctgcgccttttacgacggaggcaagttgctcgggggaggcttttttgaatccatagaaccatgactgacccggaacgcaccatagccgcacaggccaccgccgcaggacagggagccatcgccgtcatccgcatgagcggtcccggctgcatggacatcctgaaacaatgcacccctgcggctttcacggaacgcctccggccgcgcagggcgacgctggtctgcatccgggacgcggaaggagccgccattgaccaggcgcttgtcacctggttccccgccccggccagttatacgggggaagataccgcggaaatctcctgccatggcggcatgctggtgacggaccgcctgctgaaacgcctctaccaatgcggggcctccccagcggaaccgggagaatttacaaaaagggcctttctgaacgggcgcatggacctgacccaggcggaagccgtgatggatgtgatttccgccgggagcgacctggccctgaaagccgcgcagacccagctggacggaggcatcggcgcccaggtggacgaactgaaagacaacctggttcatgtgctggcccacattgaggcctatattgattttccggatgaagacatttccccggacacctcctccgatctgctggcgcgcctccggagcatggaggaaaaactggccgccctcctcaaaactgccgaaggcggacgcctgctgcgggaaggcatccgcacggcgatcgccggacctcccaacgtgggaaaatccagcctgctgaataccctgctgggatatgaccgggccattgtcagcaatattgccggtaccacgcgggacacggtggaggaatccattcagctggccgggctggccctgcggctgattgatacggccggtgtccgcgaatcttccgacgtcattgaacaggcaggcattacccgcaccaacagggctcttgaaaccgcggatctggttctggaagtggcggatgcctccacgccccggatccaagacttccccgcccctgttctcaccgcgccccggctgctcattctgaacaagtgcgacctgggagtccatccggactggaaggccgtgcccggcatccggttttcctgcgccaccggggaaggaagaaaggaattggaggaagccattatccaggccttttcctcctccctgcccggtgaaacgggcagctccctggtagccatcaatgcccggcaccagcatgaactgggcctctgccgggagcatgtccggctggcttcggaatccatctcccgccaggaaagtccggaattcacagccctggaactgagagaggccctgacgcacctgggagaaatcaccggagccgtggatacggaggacgtgctgggcgccattttttcctccttctgcctggggaaataagaagaagctttcatcaacaggtttttctgactccagattcttctttcctctccattctgtggaaggatggcaatcatccaaaaatttatttgcggatattttcattgattccggcttgttaattcgctatcgatatcatgttttatgttgcgcaccctttctctctttttccttttcgctctggttcctgttcaagccgccatttattttgcccataatgtttccgaagattcggggttcataaataccaaaaaatactggaacggagattccgatttatgctgggcggccacagccagcaatatgctgcaatggtggcagaataattcctccggcattccggctttcgttcccaacggccagaatgaaagcggaagaacggaaatttacgatgtgttttgcaataattgggccaataccgggaaaggcatagaaataggcctgcggtggtacctgggagggaaacctctcaatcccaacaattatttatacgattttaaggaaaccatcactgaaccgcagaatactggccgatactgggagggatacattacatctctgggattgtcctcttccacctgggaaggcgactgccctttcatcagcagcaaatacttcacgcaaagcgactttcccctccagttcggtacagacctcgtctcatttttccagaatggcggcgtagtgggactttccattgctcctgcatcaggtccgggtcatgccattacctgctggggaattgaggttgacgacactaccggcatggccaaatccctgtacgtcacagactccgacaacggacaaggtctggaaaaacgggacgtttattatcatgaaacggatggaaccctgcacttggggagcgagaacggccctcgaatcaacgcatacgacgccctgatgctgcccttttataatgttccggaaccttccacggcagttctcaccaccctcgcggcgggaactgccttttgccgccgcaggcgccgacgctcttaaggcttcacgaaaacattccctcctgtcaagtttccggttcttcaggaggcgaatcggtatccgaggtgaataacggaatgtaggaaggcaggttccagttccagcggatggccgccaggcgtacggaaagcgtgaccatgaagcccgtcacgaagcaggtggaagaatcaattccggcatagtaaagcaccgcgtacgccacgcctcccagcagggccgcggtggcgtatagttctccgggacggaacacgtagggaacgttgccggtaagcacgtcgcgcagcaggccgcccgccacgccggtacaaatgcccatcatcacggaaacagtgggcgtatagccgtggagataggatttttccgtgccgatcatgccgaaaagggccagaacgatagcatccgccacgcggatagtgcccatgggtggcggatatttctgggccacataaaaggttgccaggctggtgacgacggaggccagaacaaaaatttcccctgaggggagcgtccagtacaccggtatgtccagcaggatgtcacgcacggttccgccgcccagagcagccagggtgccgcagacaatcacgccgaacaaatccattttcacccgcgaggaagcgatggaacccgccagggctccaataatcgtgctcatgatttcacaggtggagaggaacatggcaggaggaacaggaaaagaggcatattcagcagacccgtatccacggcaggcaggagtcctggctggcgcagaacagggaggtggaagccagccccatgtcatgcagggtatcacgcatcaggctttctgccaatgccggagaattgctttctgcgctcaggtgcgccagcaccacgtttttcagggctccatgagcaatccgcctcagcaggtcgcacgcctgcccattggagagatgaccgtgcgcagaggcgatgcgctgcttcagcggccagggtctcctgggagtggccgctagcatgtccggatcatagtttgattccaccaccaggctgtccaccatggcaaggtattccgctatgcagccgggagcctgccccgtatcggaaatgaaacccaggctggaccgctccgtttcaaatttgaatcccaccgggtccacggcgtcatggtaagtggggaagggagtaatgacgatatcccctattctgaaagactgccccttttcaaaataggcccagggagcctccggcgctttttcctggacgcacatggccgtatggcgtgtggcgtaaacacgcacggcatgctttctggtgaactggtgcacgcctttcatgtggtccgcgtgttcgtgggtaagcagaatggcgtccagctcatccggctccactccggcggacttcatcttatcccgcagcctggcggcgctgaacccggcatccaccagcaggacggtttcccccgccctgacaatggtggcatttcccccgctgccgctgcccaacacgcaaaactgcatcatgcgcggaatataataccgcccccggaagggagcaagaacgtatccatgctttttttatgacatgggcacatgaaaaaatacttttttccagtacggggttgacatttcaggtgcattaaagtgtattgaagtcactacgtagtgtacttgcatgcgatgagcagtgtatcagacaacctttttggtgcatacacgcacaagctggaccccaaaaaccggattgccattccggccgaatggaggccctccgaaggttgcgccctgctcctgttatccggccggcgtcttgatttgccgaccgtcaaagcctatacgcgggaaaaattccagcaactcattgacaagatagaaacaacgcccggctacacggaagcgcaaatcgaccttttcatcggcaaattatacgccaactgtgtggaggctgtcatcaacgcccaaggcaagctgctgatacccaaacaaatgtgcgaacacgcacagctcagttcctccgtccggctcgccgcacggagaggatatttcgaattgtgggaaccctctctctacgaagaagtttcccggcgtgaaaacgccagcatctccgacatcaaccaatcctacggcattctctagctttccttcatgcccccagactcctccattacgcccaatccccaggcacgcccctgcgcaacgcttgcattgcgcccgggctggctggcttccggcctgggcatcggcgccagaaccgggctgcatgcggaactcacggcttattccatcgttttctgggggcacgatgcccttccggcgcaggatatggttgcctggcagcaggaaaaggcacgcctcatgacggagatgtccctggccgggcaaaagggcgcctatggcaagctgggcgcattgtcttccggcctgaaccgggcttttgacgaccatattgagctttctttacgcgcgggcgcgggtacgcacgtccgcacggaggaggtgcaggccctggcaaacgggctcgcggaagaaacgtcctgccgcgtgctggcgtggagcgtctgccgcaaccatgtgcatgtgattgcggagctgacggaggaaaaaggagtggatgaactggtctgctcctggaaggcgctggccccctccatgaactgggaagacgcgtaccacacggaagccctgaaagcccgggaagccgcggccagggtggacgccctgatttccgaactgggggatgacgccgctgccgccgttgatgcggaagcggacggggcagactccggaaacggcttccggcacattaccgtgctgctgcatgagacggtggacatgctgaaggcaggccccggcaaattcatcgtggactgcacgcttggcggcggcggccatacggaacttctgctggagcagggagccactgtctggggcattgaccgcgatgcggacgcccgccgcgccgccatgctcaggctggcgcgcttcggttcccgtttcaaagtcctcgccggcaacttccaggacgtggaaagcattctttcccagcagggggtttcccgggtggacgggctgctggcggacctgggcgtttcctcccaccagcttgacaccgcctcccgcggcttttcctttagggaagacggccctctggacatgcggatggatacccgcgccgctctctccgcccggaacctggtgaatgaggccccggaagaagaaatcgcaaatatcctctggcaattcggcgaggaacgcgcttcccgcgccattgcccgcgccatggtgaaagcccgtgcccaggcacccatcaccacgaccgcacagcttgcccgcatcgtggaatccgtcctgccgcgcaaaggaaggcaacaccccggcacccgcacgttccaggccctgagaatagcggtcaacggcgagctggatgccctggacgctctgctggattcctccgtgcgtctgctcgggcagggggggcgcatggccgtcatcaccttccacagcctggaagaccgcagggtcaagcagttcttcgacctccggagccgtccggaaatagaccgcccggaatggccggcaccccgtcccaacccggattactgcttccgcccgctttcccgcaaacccgtcactgcgggagaagaagaactttcaaccaacccccgttcccgcagcgccaagttgcgcggcgtggaaaaaatcatctgaccatctctcttccgccaccgccatgaaaagattcaaacagcgtttcaccggccaccagatcagcgtgagcatgatcatgtggctcattgccttcgccgccctcacctgcggagcgggcatcacttatgccgtgctgaaaaacgaccagatccaggtcgcgcgcgacatcaagcaaatgaacgaagagatcgcctcctgcgaacttacaaaggaatattaccgttccaagacttcctccctgaccagccgctgggccatccgcgacaggctggcccaggacaagtccaacctgcagcctatcgagccctcagccgtagaatacatttcttccgaaaacgcctcccgcatcgctgcggcaggccattaactgcgttgagccgttcatgatcacgatcacgaagtccagatttgccagaagaagcctcgtcctgtgcggcctggcgggcgcggcggtcatctggctgatgttgtcgctggtcaatctccagctggtttccccccggaaaacgagcggcgtttccagcggcggcattattgaacgggaggttcttttgccccagcgcggccgcatcatggacgccaatgaggaaatcctcaccagcaacatgcagagctccgagctgattgcggacggctatcatctgaacgaccccaagaccatcagctgggctctggcctattccaaggccgtccattccccgttctgggagaaagccgcaacggataaggaaaaggaaaagctcgtttccggcttccgcagcaagattctgggccaggccgccagcaaaaaggacggcagcaaggaacataatctggcgaaaatcctgctggaagagcctgaagacggaccggaaggggtggatatggccagaaaaaagctggaagagctttatgagccggagatggtgaaagaatacgtgcaggcgcacctggaatacgccgccaaagtgattgcccctttcctgccggacatgagcgtgcaggacatcatcaacacggtggaaaaagacggggcgattcccaagaagcgcatcgtcattgccaaaaacctgtccgaggaaaaagcggaactgctgcggcaggctatccagaacgcccgcgtccaggggttccgttttgagacctcctccaaacgcgtctattccgtgccggaatgcatggtgcatattctgggctacatcgcccagacgaaggacagcggcccccggcccatagccctttccggccttgaaaagcagctggatgaccagctgctgggccacaacggcatcagggaataccggaaagacagccgcgggcgcatcattccctccgcggattcccgcttcaaggatgccgtggacgggctgaacgtgcgcctgacggtaaacatggaataccagacgatcgtggaggaggagctggacgccgccatctctttttacacggaccagacccacaaaccccgcggctgcattattgtggtggaacccaagaccggcagcattctggcgatggccagccggccccactataatttaaatacgcgcgagggccttcaggaaggcgcctaccatttcgccgtgcagtccctgtacgaacccggttccacctttaaaatagtttccgtcacatccgccgtggacagcggaaaggccacgttcgacaccatgatcaactgcaccccctatccggtgcccggttcccgccccgtcacggacgccccccgttcctatggcggcctgaccgtagcgggcgtgctgaaaaaatccagcaacccgggcgccttccgcattgcactgaaatcgggctggcccacgtataaaaaatactttgacctgtacggattttcctccaaaacgggtatcgacctgccgggggaaaccaacagccagtgccaggacggcagcaattttgtcaacttttcccgcatcagcttcggctactccctgatggtgtcccccctgcaggtcgccatggcttatgccgccatagccaatgacggcgtgcgcatgcgcccccggctggttgacggcatttatgtggatgacaggaacttccagccttccccccccgtggaggtatgccgggtcatgagcgtcaagacggcccgggaccttcggaacgccctgttccacgttacggatctggacgggaccgccaaaagagcgcggattgaaggctataacgtgggaggcaaaaccggaaccgcccacaaggtgaagcctacaggcggctattttgaaaaccgctacaccgtctcctttgtaggaatgctcccggtggaggacccggccttcgtctgccttgtcgtcattgacgaccccacttccaagcattgccatcccggaggcggaaccgtatgcgccccggtcttccagaaactggccacccgcctggcggccgccatgaacattcctaagaacgtcccttccgcagaggcaaataaaaaagcctcccgtgcccaggcctcttccaccccatccaaaccgccgcgcagataatcccgtcatgaagctacttaccttactcaaagaccttccctcccatacgctcaccggctccccccaggtgaaaatctcccatctggaatgcgacagccggcgcattctgcccggttcctgctacattgccctgaagggaacccgggcggacggccatgaattcatcccggaggccattcgccgcggagcctgcgccgtcgtcgcggaaatgccctgcacgcaggaagccagggaagccggagtcagctgggtggaggtgaacgactcccgcctggccgtcagcctgatgggcgcggcctggaacggacgcccttcccgccacatgaccatgatcggcgtgacggggacgaacggaaaaaccacaacggcctacatcgcccattccctgctcaagcagtcctggctgcgcgctggattgatcggcaccatcgcctatgacaacggggaggaaatcactccttccacccataccacgcccggaccgctggaactggaacacctgctgaaggaaatgtatgaaaacggctgccgcggcgtctccatggaggtctcttcccacgcgctggaccaggaacgcgtggccggcatcaatttcaacgtgggcattttcaccaatctgacccaggaccacctggactaccaccacaccatggagaattatttccaggccaaggcgaaattgttcgaacagatggcgcaggacaccagatcccggcgaaaacccgtggccgtcatcaacatcgacgacgcttacggccgccggctggcggaaatgttttccggacgcatgaccgtaaagacctacgggtccgccctgggggcggatttccgcatgctggtgcaccacgccaccgccaaaggcagcgagtacgaattggaatacaaagggaaaagctacctggtccgtgtccccctgatcggcaagttcaacatgtacaacagcctggccgcgctggccgccgtcatttgcgccggcatccccgtgcgggacgccattgcgaaccttcagaatattccgcaggttcccggcaggctggaactgttcacccaccccggaggcgcccagatcttcattgactacgcccacacgccggacgccctggaaaacgtctgcaagacgctcaaggaactatgctcccgccgcctgattaccgtgttcggctgcggcggggaccgggacaggggaaaacgccccctgatgggagccgcagccgcgcgcctgtcagacgcctgcatcgtcacctccgacaatcccagaagcgaggaacccctctccatcatcagccagattgcggcgggcatgccggaaggcagatacgccatcatcccggaccgggccagagccattgccacggccatcgagcaggcccgtctgggggacatcgtcctcattgcgggcaagggccatgaaaattaccaggaactttccaccggccgcattgatttcagtgacgccaaggaagtgcgccgcaacatgttcatcaaggaacgggaagaattcccccaggcataacacgttattccgtctttctttcatgatttccctcacggcacacggcatctgcaacgtcatcggcggaaaactggtcagcggccccttcgacagggtcgcttccggcggcgtgtgcacggacagccgccatttgccgccccatgccgttttcttcgcgctggggggagaaaaatttgacggcaacctgtttgcaccggaggcatcccgtactgcggccgccgtcgtcgtcagccgtgtggaggaaggcatggacccctcctgcgccgtcattctggtggaagacacgctggaagcccttcagaagctggccgcctggtggcgttcagagctgcccctcaccgtcatcggcctgaccggctccaacggaaaaacctctaccaaggatctgacggactccgttctttcacaggggttccgcaccatcgccacgcagggcaacctgaacaaccacatcggcgtccccctcagcatcctccgggccaccccgtccgacgaagccgccgtatgggaaatgggcatgaaccactccggggaactggctcccctgtgtgaaatgacgcgcccgaaaatcggcatcatcaccagcatcggcacctcccacatggaatatctgggttcgcgggaaaacatcgcccgggaaaaatgcacgttggcacgctgcctgccggaagacggcttcatgatttttccggcggactgcgattatgcggatatgatccgtcaatccacccgcgccgcctgtattgactgcggcattggcgccggaaccgttcgcgcggaaaatcccgtctctactgagaacgggacacgcttcatcctttccatcccggatttctgccgggaagaggtggaattgcccgtccacggccggcacatggtaaccaatgcgcttctggccgccgccgccggctgggcggcaggtcttgcgaaagagcacatcgcctccggcctcaatcaggcgcggctcacgggcggcaggcttcactgcacccggatcaacggcattctggtagtggatgacacctacaatgccaacccggattccatgcaggccgccctgcataccgtagcggggctttcctgcaccggcagacgctttgcggtgctgggcagaatgggggaactgggcgcgttttccgaggaagggcacgttctggtgggccgcacggcggaagagctccgtcttgactgcgtcgtcagcgtaggaacggacgccgcccggattacggacgctatttctccgaacgccttcactcaaagcctgcatttcggctctgcggaggaagcggcagaatggctccgcagccatacggcgccgggagacattgtcctcttcaaaggcagccgcctcgcccggatggagcaagtcatgaacctcacctttccgccacagtaaattttatgcattccgttattgaacagttcagcccctcgggggcatttgcagaaccggcagggagggccctcctggcctgcctggtttcctttgccctgaccatgatattcgccccgcgggtcatccgggcgctgatttccctgaaaatcggccagcccatcaggacggcggaagaggtgcacaagctggcggaactccacggggccaaggcgggaacgcccaccatgggcggcgtgctgatcgtagggtccatgacggcggctaccctgttgtgcgccagaatgggcaatccctttatcattgcctgcctgatcgtcaccctggcgctgggcctgctgggattccgggacgattacctgaaggtggcgaaaaaaacctcggacggcatttccgcacgtaaaaaactcctcgtccagttcctggccggcctggccggcgtcaccttcctgtacctgtacccggaaggcagtccccgcgtggaacttcacgactacatatcctccctgttcattccgttctatggccaggtgaacctgccatggttcgtttacattcctttcggcgtcgtggtggtcatgtccgcctccaatgcggtgaacctgacggacggcctggacggcctcgcctccggctgctccgtcgccacgggcattacttacgccatcattgccgtcctctgtggaagctggctgacggctgattccctggatattcccttccaccccggcgcgggagaaatcagcgtcttcatgatggccctggtaggagcctgcctgggcttcctgtggcacaattgctacccggccagggtatttatgggagacaccggctccctggccctgggcggagcgttcggcatggctgccgtctgcacggcgcaggagcttctctttatcatcatcgggggcgtcttcgtcatggaggccgcgtctgtcgtgctgcaggtaggcagctacaagctgcgccacggcaaacgcatcttcgccatggctcccatccaccaccattttgaactcaaaggctggaaggaaacgcaggtgattgcccgcttctggatgatcagcctcctgctggctttcctgggccttttcctgattaccaccgcctgacaaaccacgaacatgcagctcaataacctcaacatcgccgttctgggagcgggaagaagcggacgcgccgcggcgcgcctcgccatgaagcatggcgcacgggtatgcgtgtttgacgcttcctcctccattgacggatggccggaagacattcccctgcataccgccgccacggaggaagacggacgcgcctttcatgcggatctggtggtcatctcccccggcattgagacggatagcccctttgtcaaatcctttggacgggaaggcgtggaaaccatcggtgaaatggagctggcatgccgcttttaccatggccgcatcatcgccatcaccggaaccaacggcaaaaccaccaccacatccctggtggaaaagattttgctgcgcgccggaaagaccgccgttgcctgcggcaattacggcgtgccggtagcggaaatcctgctccgggattccgtgccggacgtgctggcactggaggtcagctccttccagttggaaaccatccgcgattttcacccggatgtggccgtatggctcaattttgcgccggaccacatggaccgctacaaatccgtggaggattaccaccgcgccaaactccatatcttcgacaaccagacggaaaaagacctggccgtcgttcgctccggggaacggcttccgcacctgaaagcctccgtgctcaccttcagcccggaagatccggcggctgatctttattaccgcggaccgttgattctggagggcggcgctcccctgctgaacctggaagggaccgccctgaaccagcgccataatgcggaaaacgccatggccgccgtcctggcatgccgccacctgggcattcccgcagaaacagccgcagaagtactgaaggagttcgcgccccccggccaccgctgcgaaaccgtccgcacactggacggtgtgctgtggctgaacgattccaaagccacgaatctgcatgcgctggaagcggctctgaaatcacaacattcccccgtcatcctgattgccggaggcaaggataaggggctggattacgtacccctgcggcccatgctgaaagaaaaagtgcgcgcctgcgtggtattcggccagattgcggaccagctccagcacgctttttcccctgcggtccccacggaaaaagccgcagatgtagaggcctgcgtggcgaaagcacgctctctcgcccggccgggagacaccgtcctgttctctcccggcacttcttcctttgacatgttcaccggttatgttcagcgcggccaggccttcagggacgcggtgaacgcccttccccccctttcctgacaattcaccagaaaacgaccatcatgaaaacgaccaagacacctgatcacaatccgaccggacgcacccgtccgaaacgcaaaatgggcaccgtactccgcgccaaactcagcaaataccgcgcccgcgtctccgaatttgaagatgacgcgcccagcagcaccgtcgtgcgctggctcgtcgtccttcttcttcttcaccttctcgtcatcggcggcgtttacgtccgcagcacctggttcagaaacacggcggaaaccgtagaaatggcagccgccctgcccgcgccgcccaccgtcccgcaacgccccgctcccgcagcgcccccggccgctctgccccaggttccccaggccccccccgcagccccggtcaccatcacgcagccggaacaggtagtggacgctcgccccaccaggcagccggcccctgcggtggaggaacacattccggatgcagccccggtggcaggtcctgcgcgccacatcgtgcgcacgggagatacctgggaacgcgtcgcgcgtgacaaccaggtggccgtcaatgacctgaaagccgtcaatcccaaagtgcagcgccttgtcagcggaagcacgctcgtcattccggcccggccaggagacaaatttgaaccggaaaagtccgccgcggaggaattggagccggaaggcgtgccccacattgtgaagaaaggggaaaccctctccgtaatcgcccgcaaatacaaaatgaactggcgcacccttcagaaattcaacaagatgaatgaccgggacgtagcgcgtctcaaaatcgggcaaaaaatcatgatccccaaaaagtaggcctcttcctgcccttccgccgccatgtcttccaaagtctgcatgattctggtctggtttttcgtcatctgccttctggtcgtaggcctggtgatggtatccagcacggcggcgtgggcggaggaaaccaagcacccgtatgaacccctgttcaagcaaaccgcctttgcctgcgccggtctggtgggggccatgattctctcccggatagactaccggatatggaggaagtatatctggtggatccttgggggggcctgttttctgctggtgctgtgctatgtgcccggcatcggaaaagaaatcaacggggaacgccgctggatcaccatcggcatgcagttccagcccagcgaatgcgccaagctctgcatgatgatggccctggccaactggctggctctgtaccgggaccgcaccacctctttctggtggggttttgtgatgcccggccttatcttcggcattcctcttgccctgattctttttgaaaaggacatgggcacctccgtagccctggccctggccgcgttctgcgtcatgtttgtggccggaacgcgcaaaatttacctgggcggggctttcgccctggccggaacggccctgtacgttctggtgcagagcaacgccaaccgcctggaacgtttcctggcctggaaagacctggacgcccaccgcctgggcgccggcctccagcagtaccgtgcttccatcgccctgtcccggggggggctggacggggtgggcctgggaaacagcgcggaaaaacacggcacgcttccctttgcccacacggacttcattttcgcgccgctgggagaggaattcggtttttacgggaccatgttcgtcctgctctgctatttcctgatgacgtatgctggtatcggcgtggccatgcagtgccgggacacctacggacggttcctggccgtggggattgtcgccatcattttctgtcccgccatcctgaacatcgccgtggtaaccaacgccgtgcccaattccggcctgccgctgcccttcatcagcttcgggggcaccaacctggtctttacgctggccgccctgggcatgctcaccagcatccagaggttttccaccggcgcccagcccaattgtgaaatcacccgcaaagacgaacgctccattgacgtaagattatgactgaaccctctctcaaacatccctccctgaacatcgtgatcgcctgcggcggcacgggggggcacctttttcccggcatagccgtagcccaggaacttaaaaagcgcggccaccgcgtcacgctcctcatctcccagaagaaagtggacgcccaggccagcaaaaattacggggatcttgacttccgcaccattgaggccatcgcgatgcccaaaattccatccctgtctctgctggggttcggcgtcaggctgtacaaagccatccgtttcagccgccatcttctggacgaggtggaagcggacgtcgtcatcggcatgggaggattcacttcattccctcccgtttacgccgcccaccgcaagggaatccgcacctacgtgcacgattccaacgcgctgcccggaaaggccaaccgcatgaccgccaaatgctgcacgaacgtgctgctgggcattgaggaagccaggcactacttcaatcccgccaaatgcattgtcaccggcactccggtacgccaggaaatggtggcccggaaagacaaaaacgaagccagggcggagctcaatctgccccaggaccgccgcgtgaccctggtaatgggcggttcccagggggccaggaatctgaattccctggtcattgaagccgcccggcaatgcgcagacctgtgcgactttctcatcatcaccggctccgcggactttgcgcgcgtcagccagctgacggcggacatgccccacgtgcacgtcattgaattctgttccgccatggctgccgcttatgccgcagcggatgtggtcatttcccgttccggggcgtccagccttacggaactggcccatatggggaaggccgccctgctggttccctaccccttcgccgcagacgatcaccaggcacacaacgcacgcgttttcgcggcccacggcgcggcgcgcatgatgcgtgaaaacaccctcacgccggacgatattgcggctttcctgaatgaagtactcaaggattcctccctgctggcctccatgaatgaatgtgctttacgtctggacatgcctgatgcagtatcccgcatcgccaatgtcattgaacatacggaccatgcagcctcccatgattgaaaccttacgcaaaagactgacagacagggaacacccggcacgcctacatctcatcggggtagccgggtcaggcatgtccggcctggcgctcatgctgatggaaatggggcaccgggtgagcggctgcgaccgggtgaccagcgcagagaccgaacggcttcaaagcctagggctgtctttctcctgcccgcattccgcagacgccgtttccgatgcggaaattgtcatttattccagtgccatccgggcggacaatccggccctggcggcagcgcgcaagctgaatattccctgcatgcgccgcgcggaatgcctggcggccattctgaacgggaagaaaggggtcgtggtctccggtacgcatggaaaaaccactacttcagccctctgcgcgcacctgatgagggaaggccgcatgcgtccgtgccactacgtgggggcggaaatccccgtgctgggaaccaacgcccactggaatgaagacagcgaatacctggtggcggaaggggatgaaagcgacggcacgctggtaaattacattccggagcacagcatcgtcctcaacattgaaccggaacacctggaccactacaaggatctggatgaaatcaaagccgtgttcgaccggctttgctcccagacgcgcggcaagattatttattgccgcgcgcatcccggcgctgaggatgtctgcgccaagtaccccaattccgtttcctacggctggtccgatgcggactacaccgctacggacgtgctggaacgccgcggacgcaccctgttcaccgtgttgaaggggaaagaggaactgggccgcgtggagctgggcatacccggacgccacaatgtcctgaattccctggccgcgattgctctggcaacggaactgggcgtggatttcccggcggtgacgcggggcctggcctcctttgcgggagccaaacggcgctttgaaaccaaatacctttcctcctccatccggattgtggacgactacggccaccacccaacggaaatagccgccacgctccaaactgcccgttccctccagccgaaccgcctggtagtttacttccagccgcaccgctacacgcgcacgcagcttctggcggatgacttcggcaaggtgctccaggaggcggacctcgttttcgtagcggacgtgtatcccgccagcgaactgcccattgaaggggtaagcgggcagacgatcatcaacgccatgcacaggcacggccccgtggaaacccgttaccttcccgacctgggcatagcccaccacaccatcggcaacgcgctgaaacccggagacctgttcctgacgctgggagccgggaacgtccatgaatgcggcatgcgcatcgcgcgcgacctggccctgctggaggatctggaacgcactgcgggcggttctctggaaggcaagctgtacgaacccatgtcacgccataccaccatgggagtaggcggctgcgcccagtactggctggagccttccaccttttccggaatgcaggcggccgtcaactattgccgggacaggaatatccccgtacacgtcattggccgcggttccaacatcattgtcagggacggcggactgcgcggcgccgtcatccacccctccgggggagaattcgatgtgctggaaatccaggggaaccgcctcaccgccggagcgggcgtgcggttgaaaaaactggtttccaccgccgtccagaacggccttggcggcctggaatggatggacggcattcccggcaatgtgggaggaagcctccgcatgaacgccggagccatgggcatggatatggtcaaaaacctcgtttccgtcacctgtctggatgaagacggggaaatccgcagccatacaagggaagaattgaacgcccagtaccgttccattccggacctggtccacaattttgtgcttcaggccgtgtttgaggcgcagcccgcccctgcggaagaaatggagcgtcttctggaggcggcacgggccaggcggaagctttcccagcccgtcggagccagcgccggctgcatcttcaaaaacccgccggaaatcccggcaggcaggctcattgatgaactggggctgaaaggcgcctgcgtgggagacgcctgcgtatcagacgtgcacgccaattttatcatcaaccggggtcatgccagagcgagggacatcaccatcctgatcgacatgatccgcaaggaggccaaggaaaaccgcggcatcgacctgaaatcggaagcccaggtcatcggagaccgggacccccagttttaacccattcattatttattccaatatgaacactctcaagcgcgacctcaaaatcgccctcctgctcggaggtcccgggtcagaacgggaagtatcccttgtttccggcaactccgtttacgacgccctgtgccgggccggattcaccgatgtaacgaaggtggacgtgcacggcccggatttccggctgccggaaggcacggagctggcctacaacattatccacggcactttcggtgaggatggaaccctccaggccattctggaagaacgcggcgttccgtacacaggggccggctcccgttccagcgccctgtgcttcaacaagtcagaatccaaaaaagtttttctggaagccggagttcctacgccgcatgcggaaattctggactgttccaatggcatcgtgatgccgtccctccccctgcccttcgtcatcaagcctccctgcgagggttccagcgtgggcgtccacatcgtccgcaggcaggaggatgtgctccccgccatggaggaagccgtaacccacggcaccaccgtattggtggaagagttcattcaaggcaaggaactgacggtcggcattctggacgggaaagcccttcccgttattcatatctgcccccgttccggcttctatgacctgagcaacaaatacccgtggatgaatatgggcggcggcacggattatatttgcccggcggatcttccggaagaaaccgccgccaacgtgcaggaggcggctctgaaagcctacaaggccgccggagtggaagtgtacggccgcgtggacgtactgctgcgcgaggaagacggcgcccccttcgtgctggaaatcaacaccattcccggcatgaccccttccagcctgcttcccaaggcggcggcggcctccggatggccctatgaagacctctgcgaaaaaatagcggaattatcgctagccaccccccgtaaataacgtaatatctgacagagggcggggagtcgcccctcccgcaccccccgatgtcgcacaaagccacaacgccagtcccccgttccgccaaaaggccggaaatgcttcttctggaacgggaggccagaaaagagaccatcgaacgcaagggcaaaaactaccgtttttggctcttccggcgcaagctgtaccacattgtcaccgtttacgcgcttattttcggcttaatcggggctatcgtttttctctggaaagattacatcctcaaatacgactggctttccatcgacaccgtcaccctgaaaagcaacggcattttcaactccgaacaggccttttccgttatgggcatagggccgcaggacaacattttttccatagacgccgcggagctggagcagcgcctgaaaaaatgtcccgccatccgccgggcttccgtcaaacgccagatatcctccaaccccacgctgctggtggacattgacgcgcgcatccccgtggcctggattgactgcccggaactgggaattcacccgggagatgccacgtacggcgctttggcagacaaggaaggcgtcatcttcccctgcatggagcaggtccacatgccttatatccgggaaaagcgcatgccctccgtcacgctcaggccgcccagttccggcaaactcagctacggcgtcagcatccgggaactggaagcgcccatgaaactgattgaactgctttccggcacggtaacggaataccttcccagcatcgtctccataacgacgcccaacgactggtctttctgtgtgcgttttaccaatgactgccaggctactttcagccattacggcctggaacaccaggtggaaaaactgtcccgcgccctccggcacgcacgccagacgcaccgcaaaatcagttccatcaacctgattccggagcacaacattcccgtcatctttgacgattcctacgaggatattcctcttgcggagccgattgaagaataacgccgcccagacgttctccggaaaagccgtgttcttctccggctccaaacttcttttccggtctcgttccccctgtttcccctaatttcccgccgaacggaacacccggttttcacaagattcttcccatgtcagaattctgttctttgtcaatggggaatgagtctgcgaagacccacagaacacttgccaataaggctgtcccggttatactgcgctacgatatatgagcaacgaaacacctttatcccccgaagcggaaaaactggcggcagcccgcaagcgcaaccttgacctggccctctcccaaatccagaaagacttcggagaaaacgccattatgcgccttggagacaacgtcaaaatggaagtggacgtcattcccacgggcaaccttctgattgaccgcgctctgggtgtgggcggctttgcccgcggccgcattgtggaaatctacggaccggaatcctccggtaaaaccaccctgaccctgacggccatcgcccaggcccagaaatccggaggcctggctgcattcattgacgtggaacacgcactggaccctcagtatgccgcccgcctgggcgtgaacctggacgacctgctggtttcccagccaagttccggtgaagaagccctgcaaatctgcgaggctcttgtccgctccaatgccattgacgtcatcgtggtggactccgtggccgcactggtcaccaagcaggagctggaaggagaaatcggggattccacggtaggagcccaggcccgtttgatgtccgccgccctccgcaagctcaccagcttcatttccaaggcccgtaccgtctgtattttcaccaaccagatccgtgaaaaaatcggcgtcatgttcggcaatccggaaaccactcccggcggccgcgccctgaaattctacgcctccgtacgtgtggacatccgccgcatcggccagatcaagggcagcgacggcgtcatagccgggaaccgcaccaaaatcaaggtagtcaaaaacaaagtggctcctcccttcacggaatgcgaattcgacatcatgtacaatgaaggcatctcctccgtaggcagcctgctggatctggcaacggaatatgacatcatccagaagcgcggctcctggatcagctacaacggcagccagatcgcccagggccgcgacgccgccaaggaagctctcaaatccaacccggagctgtacgcggaaattgaagaacaggtcaaggccaaaatggacgagaagaccgccaaataatcccgcctgatcccgttccttcactgccatttcagggcggctccccttcccgggagccgcttttttctctccggaaacagaagcgcaaaagaatctttcacggaaacttttcccttgtgcgtcatgaaaaatccgttagtctggatgcgatatcgtcctatgtatccgacctctcgcacatcatttgcagccgtgctcggcattgtgggcatgtttctgctgacgttgtccacggccttcggatggaatccggaaatcattaatggagtgcagtatattccgatgtcagaagtgcgcacccattacaaactgaccagggaacgcacggaagggcggcagaaagtttacgaggtgccggaaaagattcaaatccgtatccaggcgcgcagccaggagatgttcatgaacaacatgaagttcgtgctatcctatcctgtggctgaccatccctccaaggggctgatggtttccaatatggacctgcacaaaatcattgacccggttctgcgccccacttacatcgccaaccgccgcagtttcaacacagtagtcattgatcccggccacggcggccatgacagcggcacgcgcaaccgcatcagcagggaagcggacatcaacctttccgtgggcaaaaagctgcgcgaccgcctcaaggccatgggctaccaggtggtcatgacccgtgacacggacaacttcattgcccttcaggaccgcgtccgcattgccaacaggcacaataatgccatcttcatcagcatccacttcaatgacggaggctcttctgcccgcggggtggaaaccttcacgctggcgcccgcgggcacttcctcctccatgtcccgcaatatccgccacgacgccctgcagggcaacgcccaggacagtatgaacattgccctggctacagccgtccaggggcacatgctgaaaggaccgcttgccatcaaggagggcatttccatggttgaccgcggcatcaagcgcgcgcgctattccgtgctgtgcaccatcaagcatcccgccattctggtggaaggcgggttcatgtccaacccgcaggaggccctgctcatcgccacggagcgttatcagaatttcatggcctcttccctggccgccgccgtgcaccagtaccgcaccgccctgggccggcaagtgcgcagaacgcgctgagttccctaactgtcccggggcctcccttcagcagcatgaacatcatccgcattcccggcctggcagattatcaggaaaccttgaggctccaggaacaactggtccgggcccatcaggaagacccggacagggaaaacgaactgttgctgctggaacatgccggggtttataccatcgggcgtacacggaaccacgccagcctgcaccccggttccgtgcttccctttcccgttcatgaaataaaccgcggcggccaggccacctaccacggccccggccagctggtcggataccccattacggacctgaaccgctgcggcagggatctgcaccgttacgtcaccaccctggaaaacaccctgattgaaacctgtgcccggttcggcgtgcaggcccgcatccgggaagggctggtaggggtctgggtggaaaaccgtaaaatagcctccatcggcgtcggggtgaaaaagtggatcgccatgcacggcttcgccctcaatataacccggaaatccctgcctcccttccttgctattaccccctgcggcatccagggcgtgcaaatgacctgcctggaggatgaaatgtcctccctcctgccggaaggaaacctgttgaaatgtttcggagacgtttttgcagcactatgggaagaaaaatttaaccggtcttaaggggattcggaacgtgcggagggcatgaaaaccatcctttccttgaaggcggaaaggccccaaaggctggaaagaggcccattcagaccatgaatgcagaggaaatgttcaaaaaaacgccttatgtaagacacagaccgtgtcagcaatacgtccttgcatcttgacgcggttcccgaacggacggatgcttatgtcagttatggggaaaacgcttttccaaaaaatctgggacgctcataccgtcggcatcctgccggatgggagaacgcaaatgttcatcgctacgcacctgctgcatgaagtcacctctccgcaggctttcggaatggtccgggacctgggcctgaccgtgcgccacccggaacgcacctttgccactgtggaccacatcattcccacagacaaccaggcggaaccgttcgcggacgccacggctgacgccatgatcagggaactgcgccggaactgcgctgaaaacggcatccgctttttcgacctccctaccgggctccagggcatcgtgcatatggtagggccggaactcggcatcactcagccgggcatgactatcgtatgcggagactcccatacggccacccacggagccttcggctccattgccatgggcatcggcaccacgcaggtgcgcgatgtgctggctacgcagaccctggccctcagcccgctcaaggtgcgccgcatcaatgtgaacggaaagctggcccccggcgtgcgcgccaaggatgtagccctgcacatcatcggccttctgggagccaagggcggcctgggcttcgcctacgaatacggaggcgaggtcattgacgccatgagcatggacgaacgcatgaccctctgcaacatgtccattgaaggcgcggcgcgctgcggttacgtgaaccctgaccggaccacggtggaatacatcaaaggacgcctgttcgcccccaccggcgcggactgggacaaggccgtggaacgctggctgggctttgcttccgacgcagatgcggaatatgatgaaatcgtggaaattgacggagcttccattgagcctacattgacatggggcatttctccggaccagaatacgggtatcagcggcagcacgcccaacccatccgacgcagcgaacgacgatgaacggaagatgatcaatgaagcgctggaatacatgaaattccccgcggacatgcctcttaaggggctgccggttcaagtgtgcttcgtaggttcctgcaccaatgggcgcatttcagacttccgggaagtggccgccctcatcaagggtcgccatgtggcccccggcatcagggcactggccgttcccggctcccagatgactgcccggcagtgtgaagaggaaggcatcgcggacattttccgtgaagccggctttgaatggcgcctggcgggttgctccatgtgcctggccatgaatccggacaagctccagggtgaccagctctgcgccagttcctccaaccggaacttcaaaggccggcagggaagccccaccgggcgcaccctgctgatgagtccggccatggtggccgccgctgctctgaccgggaaagtctccgatgcccgcgaagtgttctccctgaattaactttccaattttttcctttatgtctctgacccaattcacctccatcaccggcacctgcgttcccgttccgggaccggacatggacacggaccgcatcatccctgcccgcttccttaaatgcatcacgtttgacgaactggcgggagtcatgttctgggacgaacgcttcgatgaaaacggacaatccaaatctcacccggtggacgatcctcgcttcaaaggggcttccatcattttgggcggctccaacttcggctgcggttcctcccgtgagcatgccccgcagacgatcaggcgctccggcatcaaagccgtcattgcggaatctttcgcggaaatctttttcggcaacagcaccggtatcggtttgccctgcgtgtgcgcgtctgccgccgacattgccgctctggcccggcacatttccgatcacccggaaacggaagtgacgattgacctcctgaacatgacagcttcctggaaggaaggctccttccccatccggatgccggcggaagcccgcgaagccctgacccggggccgctgggattccattgcggaactgcttgtcaacatggacgccgtagaaaagaaaaacaaggaactgccccaggtcgcagcctcctgctgattcagcattcacctctttcctccccttctatcccccttccccatatgattttcagaattacagactacgtccactacggcacgctggacaaccgtgaacgcggaaccgtccgccttacgctgcagctcatggggatgccccatccggtaaatatcaccctgcagggggactgcctccaggatctggccggttgcgtggttgatttcaggaatccctctccccagacccttcccgcggaacttacccagatcccggaacatatccagggtgtggcgggagacatgacggccagccgccgcatgcctgtcaaaggcaggaaaaccatggaaaacgccctgtacctggaatggttcaccagccaccatgacatggtgctgctggaaagtacggtcttctccatcaaagtctccctccccgaatggattatggattcctgcgaagagcaggcccagatcatggcgaaccagcagatgctgcggacccaggtaaaggaatggtccagggcctattccaaccaccaggaggacggaagcctgcccgaccaccactgggacaaacgcctgcgggaggcggaagccatcgccatcgcctaccaggaggtattccagaaatacaggctgaaccccagcggagacatccgtgtggcctttgtcatgggctgggatgaagtgctggacaacatcgcccagtcggaagaaacggggacgccctgttcctgcaaaagcaccggcatgctcagcctgtttgacattctcaacgaacaggaggcccgggaagtgcagtcctgcatgtttcatcccctcttccagcaggtgatggagctgacggatctgtgccagcaccggttcagccgggaaatcaacaaagcccagaggaacaggacggggccgccggaacccctgaaccagattttttactgcatccgctacatcaccccgcgcattctttcctgcctccttcaggagaaggaagacgcggcggactactgcaccatggccgcccgcatggccctgtgcgtggaacaaacgcgccagacggtagctgcgctggacagccgcggctaccagatggacggcgaaatagcggaacgtttctcatccctgctggaggaagtcaattccttccaggaaagcctggcaacacaaagccgcaaaagcaacctgtaacaacaaaaccttccctggcaacacaatcttcatctttgcgtatgatacattcccacacctgttttcaagggctgtgcgcagtcctggccggcaccgctctttcccacgcggacgagccggctgtttccatttcggacttcggggtagataaggtcatgtccggccctgtcgtttccatcaatgatcagtacaagggcgtcgtgaaaattgagatggattccctgactccggattacgctactccgtggaataccggccgctaccaggggggcatcggcaccggctttctgatcggggaaaacgccttcatgacgaacgcccatgtagtcagcaacgcggaacgcatttatatctccatgtacggagattcccgtaaaattcccgccagggtcaaattcatcgcccatgacgcggatcttgctctgctggaggcggacgatcccaggcccttcaaaggaatacggccttttgaattcagcaaaaacctgcctcatctggaagacgaagtaagggtgatcggctaccccatcggcggcaacaggctttccgtcacacgcggcgtggtctcccgcattgatttcaccacgtacgcccacccccgcaacacggaacacctgaccatccaggtggacgccgccattaacccgggcaacagcggtggccccgtcctgatggggaataaagtcatcggcgtggcattccagggcctgaacaacgccaataacacggggtacgtgattccaacccccgtcatccgccactttctggaagacatcaaggacggtgtctatgacggttacgtggacatgggcattcaggctgcgcccatcctgaacccggccatgcgcaaggcgttcggtctgccggacgacgaaaaaggcgtcctgatcggcaaggtgctcaaggggtcctccgccgacggcgtgctccgcaacggggacctgctgatgaaagtggacggctatgatgtggacagttccgccatgattgaactggacggccagaaaatcagcatgaaagaactcattgagcgctgttttaaagacgaccggctcccgctggatatcattcgcgacggcaagcccatgaaggtggaaatggtgatgaagccatccccctccagagaccttctgatggcggaatacgataaaatgccccgctacgtcgtctttggaggcctggtgttccagcccatccagcgcaacgtgctcgcggcggcggacatctccatgctggacgttgcactggacatccggaattaccaggaagacggcggctgcgtggaccatgaagacatggtcatcatcaccaaagtgctggatgatgaggtaaacgcgcgtctgtccggctccatttccaattccattgtggaaaaaatcaacggcgtaaaggttaaaggccttacccacgcctacgaactcctttacccggagaacatgccggaatacgtcgtcatcgaactgaaaaacggagagcgccccctcgtctttgaaggcaaggccatggagacggccaacaagcgtatctccaaaacctacaatatcccgaaaaacgcccgcctggacagcgccattcccggccgccagcctggccgcaacaccactcccgcccgttaaccgccatgaaaattctttccactcttttcctcggttccctgatgttgctcggcggctgccagccgcgcgaagccggacgaaccgctcccgaaccccagcctgaacaacagacggaaacgcctgcggaacaggtggaggaaacgcccgcgccggccccgcttccctcccccaccggctccatggtcggcattaacgccaccaatcagggctatgccatgattcagccgtggagcaaggaaaacccggcgtacagccagggcttcggcatttatctgggagacggcaatatcctgacggcagccaacatcgtttattccgccagcttcgtggaagtgacctccgcggacggctcccagacggttcccgtgaccgtaaccgcctttgacccggaagccaatcttgcccttctgcgcctgaaaaacggaaaagatgccgcttttctggacaaactggtccccgttgcattggggaaggctccccgcctgggcgacaaggtaaccttctggcaattcaatggcgacggccttcccatcactacctccggaacccttctggcgacggaaagcgcctgcccgttcacgaacggggaaccgttcgtcctgtataacgtcaaatcctccgtcactcccctgaaaggcggcgcaggcaaccccgtcatgaggggcaatgaacttgtgggcctcagcgccagctgcgatccctccgcacagaaagtgctggccgtaacccataccatgatttccaggttcctggaacaggcccgggccggcaattacaccggtttcccggcggacggcacccaggtcacggaactgaccgaccccgtcttccgcaaattcctgggcctgcctgaaactggcggcggcttttacgtggtgaaactgcctgtttacggctccttctacaaagccggagtacgtcccggagacgtggtggaaagcgtcaacggcatccctctggacagcaaaggtttaattaaggatcccgccctgggccccgtttccgccaactttctgttccgagactccgccaaaccgggggataccattacgctgggcatccgccgcaagggaaaggacggctccagccagcccatgacgctggacgtcaaactggacaggagcgcccttgaaggggacctggtcaatccggcccccttcatctccaatccgccctaccgcatttacggaggtctggtatttgtcccgctgacgggagccctgatgggagaaatcaacaagctcagcaagaaccatccccccctcaacctggtggaagccactcaaaagaaagaggacatacggaaaaaaggcgtggatgaaatcgtggtcttcctgatggccctgcccacccaggctacactgggatacgcccagatgagtccctccattgtggaaaaagtcaacggtgtgcaggtgaaaagcttcaagcacctcaaccagcttctggaccttcccgctcccggcggcacgcaccgcatcgaagtgacccagcagccgtacaccatgtacatgtcccagaaggaagctgccaaagcggaccgcttcatccagatgagggccgttcccgtgctccgcagggactaggaatccgcgagccatgttcacttgcagccctcctggcatgtcacttcacacgctgaatatccggcttgattttccctacaggacaggctttacccatggagccttccgcccggaaaacgatgctctggccagcctgatggaacagaggcccggaagccgcgttctcgttctcctggaaaaagggctggaacagttttatccgcagcttccgtcagacattgaccgctattttgaaaaaaatgccggggtactggcctatgccggctgttgttccgttccgggcggggaggaagccaaaacaggtttttccgcatgggaaacggccctgcgccacattgtggaagcaggcattgaccgccattcctatatcatagccgtgggcggcggagcgtttcttgacgtagcaggctttgccgccgccaccgcccatcgcggcatccggctgttgcgcatccccaccaccaccctctcccaggcagactccggagtaggtgtcaaaaacgggatcaatttcatgggccggaaaaactatctgggcaccttcgccgttgcgtgggccacgcttgacgacttcctgttcctccattcccagcccctccccctgaaaagagccgggctggcggaagtagtgaaagtggcggtggtgaaagacgcctctttcttcaactggctggaaacgaacgcctccgcgctggctgtatgcgaacgggatgctctggaatatgccgtggagcattccgctctgctgcacgcctcgcacattgcatgcggaggagacgcctttgaactgggttccagccgccccctggacttcggacattgggccgcccattatatggaaaccatgtccggctacacgctggggcacgcggaggccgtttccgtgggcatgtgcctggatatcctttattccgtccggaaaggatggctgcctgccgcggaggcggaaagaatcatctccgtgctgaaaaccctggaactgcccgtattccaccctctgctttcccgcaggacagaaaacggcgcctgcgaagtgctgaaaggtctggaggccttccgcgaacacctcggcggccacctgacggtactgatgcttaccggaataggccggggaaaagacgtccatgagatagatgccgctctgatggaggaatgcatccgggaaatgcaggaagccgccggatattccgttcaggaataacagccctttccttgctgcctccccgtcagaaaacaggcagaagccatctggcgtatcacagagaaataccagccggacggcagtatgaaaaaaacaacgatgtttttccttcccacaatctccatatcctcctgttccggcagttcccgcagggcggcattattatgtgctgccgggcagcccatgatgcaagccattttgcgactcccccttttttcataacgcgccggatttacttctcctttttcaaaaagaagatgaaggaaaaagcatgaacagcctgccggatacctcaaagagaagatcatccgtcaaccatgcggaggcagtggacacgatgcctccctgggaacaaatccattcatcgtctttgcaaggcactggaaaaccaaactgccggaaaccgcgctccgctgaaaattcagggatggatcttccggaaaaccgtccctcttaaacctgtgcggataactccgcaggaaacggaactttcccgtattcgtccaaactgacgccgggccatccccatttacagacgcggtacggcggcgagaagcgcctgcgtatattcgtgggaaggggaagaaaatactttgtccgcctccccgtattccacaatgcggcctttgcgcatcacggcaatgcggtccgcgatgtaatggaccacggacaaatcatgggaaatgaatatcatggtcaggctcaagtcgcgggccagggcaataagaaggttcagaatctgggactggatggaaacgtccagcgcggaaacgggttcatccgcgataaccagcctgggttccggcgccaatgcgcgcgcaatggcgacgcgctggcgctggcctccggaaaattcatggggatacttgcgcatcagggaggggctcagccctaccttttccatcagttccgccacatcatccctcgtctgggcaaaagttcttttacggcggctctgtaacgcctcctttaatgttgcatataccgtaaaacgggggttcagggaagcataagggtcctggaaaaccatctggaaatccggacgacgcttcctgacttcggatgcggaaagggccgtcaactcttccccttccagaaaaatgcggccctccgtaggcttctggagcagcatcaccgtgcgggacagcgtggatttgccgcaaccggattcacccaccagccccaggatttctcccttttccacggacagcgacaccccgtccaccgccactacgggggcagatttgcgggcagagagcagcccctgcaccgcaggaaagacaacgctcacatgatccagttccagaaaagccatgccgccaccctaacaagccttccgatgcaagacaagaccccagccgcgccagttcctccaatatcaggacatccatgcgcacctcccatgccgtttcccccacagaaaaactaggaccggcaatgaacgccagccccggctgggcatttcgcatgtcttccggagccacccggagccagaagagttcatcatcacacacgaggctgataacagcaaaagaggctgttcccccatttccaccgtccattggcctttttgaagaaccacaataccgccaggaaatatcagggatcgcacacaaggaaaaaacatgctccagcccaaaagcgctccaaaaacggctgccaggatgaaggccgcaaccagcagcagagccggagcttttctatcccgcatattttgatgatcccctatccggatttccggattctccctgaatcaaattcatggataaatccccccatggagccatatcaaacaaaagaaccgttccccgcaaagggaacggttccagagatactctgactcagagcttacgcaccgagctggtagcggacgaaggaggcgacggagatatcgtcgccgagttccttgccggcctggttgaggagggcctccaccgtcatctttccggcaggatccttcacaaatacctggttcagcaggcaggactgggcgtacagagccttcagcttgccgggaagaatcttttccagcaggtgttcgggcttgccttcctgaatgagctgctgcttggcgatttcctgttcctcggccacgaaggcgggatccaggctatcggagctgacgctcttgggagcggcggcggcgatgtgcaaggtcaaatccttggcgagggctttgaacgcatcagacttgacggtttcttccttgccggccttgatggacagcagaacgcccactttgccgcccatgtggatgtaggagaccacggcaccgatgccgtccgccgtcaggcgggcgaatttgcgcagagccatgttttcgccaatggagctgcacatggccttgatatattcttccgtggagccttccgccatggggacttggagagcctcttccagcgtggaggccttggaatccatgagagcgttggcaacgtcattcaccagaccctggaacttgtcccccttggcgcagaagtccgtttcacagttgagttcaaggataatgccggagcagccgcagggagccacagcggcgcggatcacgccttccttggcgtcacggtcggccttggccgcagccttggcaattcccttctcacgaagatactttacggcggcatccatgtcgccgttgcattcgttgagggctttcttgcaatccatcatgccggcgtccgttttgtcacggagggccttgacgagagctgcagtaatttctgccatagtgtttctgttctttctaaatggttggtttaggcttcggcggatgcgcccttgccttcgttgatggccttgacaatgcagtcaagaatcaggcggatggaacggacggcgtcgtcgttgccgggaatcgggaagtcgatttccttcgggtcggcgttggtatcaaccagaacgcagacgggaatgttcaggcggtgggcctcgcggatggcgatgtcttcatggtcggcgccgatggccaccatggcgtccggagcgccgcccatgttgcggatgccctgaaggttgcgttccagcttctggcgttcgcggtccagagcggccagttccttcttggacatgctcttaaattccgggctcttttcaatcccttccagatagacaaggcgttcaatgctcttgcggattgtgctcatgttggtgagcatgccgcccagccagcggtggttgacatagtactgaccagtggcttccgcagcttcgcggacggcttcctgagcctggcgcttgcagccgacgaagaggatttttttattgcggcgggccagatcagccaggaaggagcaggccttgtccaggcatttttccgtttcctcaaggttgatgatatggataccggccttgtccttgagaaggtactttttcatgctggggtgccatttgcgggtttggtggcccaaatgaacaccggcttcaaccatctggttaatcagatcattaatcatatatgtatgtaggtggctttccttgcggcaggaaaagcagtttttggggacttcgacgctttttacccctccgatccccgttgtttagttgcgccgaatcacgcgagggacgggcaatatacttcccgccccctctcttgtcaaagcataaatcattgatttacgaaactattccgccgttcgcggaaccttgtcgcaagcaagctcatggagaactttgccatttcagcaaaatatcttaccgcgcagacccgtcaaaaccgttcccggcagactctcccatgcccgttttccagtattcccgttccgcttgcaaataaaacgcaccgaacggaggcaggatttttaacgttttcccatgccgtgcggccagttccggagagggcatgtcctcccgcatatgcttcccttttccaatcaggaacggcagcactaccaccttttgcccctttaatccgggtaataccttttccacagaaggaaatgcgccaaagtatgcaagcgccatgtccgttccttccggaagccggaatttcaactgctggaggaattgcgccggctcaggggcagcctcccttcccgttaccccgtgggctaccaccagcagggaagcctccccctccaattccttttgcaaggcggcggccctaaaaccaacaccgccgcatcccgctccccatacgggtttaaaaacaagttccggatgctgcccgctcccggcatacagcgcacgaagcaattccggcaatgtctccgtcaccgtcacgccgctctgcatgaagacagggtaaacccagactacaccatcgcccggaggcaaatccgccgccgtcaggctgcggaaagacgcctgccagacacaatcgcttgaatagtgaaactgctccgccacatgctgccgcaattcagcccctgcttcatcataggaaataaagagtttgtaaatcttcctgggcatttcggtaagaccactgcgggggaacggcgttcggaacatcctgtcatttattcatgcggaagtaacgcatgatggccgtttgtaacaaaaagtccggagggcggcaactccatacgcttttttccaatccatgctcccctccatttacacgcacctatctaaaaaatatttaccatatttataacaaaatcattatatcgaatataaaaagatacttccggaaaaataaaccttcgcctccgaatctccgcgcggaggcaggatagcggcttgaccgaaaggcctgaaaccgtcatgatacaaggacatacaggttttgttttatgtcgttttacattcaatccgttgaaatcggcggcccgcggccgttctaccttctgggcccctgctctctggaatgcgaatcctttgtatgggagatggcccgctccatcaaggccatcgcggaaaacctggatgtcccgctgattttcaaagcttcctacgacaaggcgaaccgcacttccgtcacctcttttcgcggccccggcgtgcgggaaggctgccgcattctgtcggaaatcggcagggagctgaaactgcccgtcgttacggatgtgcatacggcccaggaagcggaaattgccgccgaatacgtggatctgctccaggttcccgcttttttgtgccgccagacggatcttctggaagcctgcgccaagagcggccggcccgtgaatatcaaaaaagggcagttcctggctccgtgggataccgtgaacatcggggaaaaaatgcgcgccttcggctgtgacgaattcatgatgtgcgaacgcggcaccacctttggttataacaatctggtggtggacatgcgctccctgtactggatgaaacaggaaggctttcccgtcgtattcgacgccactcacgcagttcagaaacccgggggattgggaggaaccacggggggagacagcgagctggcccccgtgctggcatccgccgccatggcgacgggcagcattgacggcgtgttcatggaggtgcacaaagacccgtccaaagcgctttccgacggtcccaaccaaatccctctccacctgcttgaaggagtgctgaaacgccttcagtccatccaccaggcggttcagtcatgatgaaattattgtccacatgctttttgacggccgccctgtacggcacggaggcgcaagcggacaccagcctgcccgcggccacgccttttgccggcgtagataaaaaattacctatgctggagctcctgcccgtaggccaggtgctcccaaaagtcagcctgtcacgatatgaagggccgcgcctttccatgctgctgacggcttcaagcgtgaccgtggccgccccgcaggaaattgccgcgaatatcctgaacgtgtatttgtacggaaaaaacaaccagacctcccaccttttcacgaaggccgcctcttattttctggataaaaaactggccgcctcccatacggaaaccaccctcagggaagagaatctttccgccaaagggaccggcctttacctggacaccaatatcaagaggggcatcattctgggtcccgttcaaaccaccatccgcatggctcaacgcaacaagtaaccattcctttttatgaaaaaactttcctccctgctgctggccctggccggaagccttgcctgcagcggcgccaacggcgttccctcccacattgtccagcccctgcccagggaactggatccccgcctggaacaacccctcaccccgcctccccatattgtacgccccctgacggaggaagagacagcccggagggaacgggaactggcccctgttccgaccgcaggcttgaaggaagacggggaaaaagcgattcaaacatacagcgcgcaggaaaaaaccgtggacgggcggattcaagaattccgccagcagcaccaggttgccggaaatactcccgccccggctgcggaaactactccctcttccgcagcatccggcccggaggaaggcttcctgcaggccaattccccaaaagacctgtacaccgtagattgtgacggagacttgtacttcgatatggaagaaggcgttctggtgttcatgaaaaatgtccgggtgcgcaaccccggcctttccatggattgtgcggatcatctgaaaatttatgcggaattcgtgccgaagaaaccgggcgacaaaaaaccctccgacgtcaagaaggaaaaggggaaagaggaaaatcagactcaggtggctctccccaacggaggcaatttcgactacaattccattaaaacggttgcggcttccggaaatgtgaaggccagttacaccaacaaacagggagaaacaagcaacgcccaggctgaaaaaatcacctacaacgccaaaaccggagaaatcatcctgacgggtgccccggtcatcgtcactccggacgtcatcgtgaaaaatccgaacaaggatgctttcattcgggtgtactccaacggaaacatgtacggcagccgcggaaccaagactacgttccgccacgtagacaaaaaactttccgaccgggaaaaccagaaaaccagccgcaaaccgtgagttcgttccactcttctcctttgctaagcgccgaaggcatctacaaaacctacaaaacgcggaccgttgtggaccaggtcagcctgaaggtaggccatggcgaaattgtgggcctgctgggaccgaacggcgccggaaaaaccacttccttttacatggtagcgggtctcgtacgcccggatgaaggccgcgtgatttttgcggacgaagatattacggaattgccaatgaacctgcgcgccaggcgcggcatgggttatctgccgcaggaagaatctattttccgcaagctttccgtggaggataatcttctggccattcttcagacccgcaaagacatgacttcccgccagcaaaaggaccgcgccgtagagctgatggaccgcttcggcatcaccaagctgcgccgctccatggccatccagctttccggcggcgaaaagagaaggctgaccatcgcccgcgccctggctaccagccccaaactgctgatgctggacgaaccgttcagcggcgtggatcccatcgccgtttcagacattcagaaaatcgttatggaactgcgcgatacggacggcctttccatcctgattacggaccataatgtgcgggaaaccctccacatcgtggaccgcgcctacattttgtttgaagggaaggtgatcaagcacggtacttccgaggaaatcgccaacgaccccatcgcccgcaagcagtatctgggcgaccagttccgcatgtaactttattttccgtctttcccatgtcctccccacagaatacgatcgccctggttttcgactacgaccagaccctgagtcccttctacatgcaggatcaggccatcttcccggaattcggcatttctccgcaggaattctggaccaggtgcaacgccaccggagaaagagaaggctgggacggagaactgatttacatgaaaagcctgctggacgccctttccctggaccgcgtcagtaacgcccggcttacccagcttggagagcgcctcaccttttaccccggtttgccggacttttttgacgcgttcccgtccatgaccctctcctcccttcatacggatctgggcatcagcattgaatactatatcatctcctccggtttgaaagccctgattgacggttccgccctgcgcccttatttcaaggccgtattcggatgcgaattcagcgaggagaacggctacatcaattttcccaagagagtcatttcccacaccacgaaaacccagtaccttttccgcatcaacaagggaatgctggattacgaccaggacgtaaacgaccacatgccggaagacatgcgccccattcctttcgccaacatgatttacatcggcgacggccctacggacgttccctgcttcaccgtcatgcgccggaacggaggccacgccgtagccgtatataatccggaagatgaaaccggccgcagtttccgcaaatgctataacctggcctccaattccgaccgcgtgaatttcatcgccccggcggattacacgcccggcagccatctcacccgcctgctgtccggcatggtcacggatatcgccaacggcattgtgcgccgccgggaccgggctctggcggattcctgtattgcggctccttccttttccaaataaaacccgctccattcctctccccgtcatgaacagccatttccactttctcggcatctgcggcaccgccatgggcgcggtagccgccgccatggcccgccgcggctttaccgtcaccggttccgacgccaacgtctatccccccatgtccacttttctagaggaggaaggcatcaccctgtttgaaggctacaaggcctccaacatcccgccggatgcggacgtcatcgtcatcggcaatgccatgagccgcggcaatgaggaagtggaagccgtgctccaacggcgcctgcgttacctttccctcccggagacgatgaaggaatatttcctgcgcggcaagcgcaactatgtggtaacaggcacccacggaaaaaccaccaccacatccatgctggcgtggctgatggaggattccgggctgaaccccagcttcatgattggcggcattgcccgcaatctcggacgcgggggccgttttacggattccgatttttccgtgctggagggggacgagtacgacacggcgtttttcgacaagcgttccaaattcctgcactacctcccggaactggtggtcatcaacaacattgaatttgatcacgcggatatttacaattccctggaggaaatcaaactgagcttccgccggctgacccagatcatcccccgcaacggcctggccctggtcaacgcggacgatcccaactgcctggacgtggttaagggggccccgtgccccgtcaagacggtgggcttttccgactcttccaacatccgtatcctggatgtggagacctccacggacggcagccatttcacactggaaggaacccggtactacgtaccgatgattggagagttcaacatccgcaacgccgccatggcaattgccgccgcacaatttgcgggactgaacgtcaagcagctggcggattccatgagccgctttgaaggcgtggcccgccgccaggaagtcaagggggtagtcaacggcatttccgtagtggacgacttcgcccaccacccaacagccatcaaacaggccatcctgggcctgcgccagcgctatccggaatcacgcatctgggccattttcgaaccgcgctccaacaccacacgcagaaatatcttccagaatgaactggcgttgtccctcgctacggcggatttccctgtggtagccgccgtggatcatccggacaaggtggctctggaggaacgcctggatctcaccaaactttccaacgacctttccgcgctgggcaaggacgctctgattggcggccatgcccaggaaatcgtctctgccgtctgcaagaaagcccagccgggagacgttattctggtaatgagcaacggcggttttgaaggcattcacgccaaattgctggaagcactgaacgcctgacccttcttcatacatccacttccaatgaaaaacgcatccaccatcaccgccttcatcatcagcttcctggtcgtaggcagcctggccctggttttcctgttccttgacaataaggaagaggaacccgccgccgctgaaccggcggtgcaaacggaagtgccggcacgccagacggtaacgccccaacccaccgtcgacccgcttaccaaggaagatatcagccggcagacggctacgccgccctccctgatcaatctcagctccccccagacactggcgcaggcaattgccaaagtcattcaggaccgggatgaggacatcctgaaatccctggaaatccagcaggctgtgacggagaaccagagccgcctcatccgggagctcatggaagcccgccatatacgcctttcctctcccggcatcaccagcatcggcgcgaacaaccagggggccaatcccacagccagatacacgctcaatttcagcagcggcgcgcgcggctacctggatatgaagcgcaatgacaagcaacaatggacgctggataccctcactctgcccagcaagcaggatctggccaaggacaaagtcgcccccatggcgatgaatgaccccatgggcatcgtcagttccttcatggatgccgtcgccaaggcggatttccgcggggcgaggaagttcgtggacggaactaaagtgcaggatgccacggtagccggtttgtgcattctgtttgaggagggggctttccggctccgggaggacgctcccatcaaaaccgcctacgaagcgcccaccaatgcggggtttttcgttcatcttcaggacgcccagggcaggaaggccggcaatgtaggcctgaccgtggccaaaacggacggacaatggctggttgcggaagcttccctggacagcatgctggaagcctatacgaaacggcagggggccggagacgacatctttatccccattgtaaaaaatccccagggcggcgattccctggccctgttcttcggctttaatgaagataccctttccaagcgttccgaacgccagctgcaaatcgtagcggaagctatcaagatggacagtggcaagaagctggaaatcagcggccatacggatgacgtggggagcgaacgctacaaccaggggctctccgaacgccgtgcggccgccgtgaaagcccagctcgtccagtttggcgttcctgcggaaagaatcgttaccaagggattcggcaaatctcagccgcgccgaacctactcccccacggcagacgaagaaacaagggatgaagcccgcaaggaaaaccgccgcgcggaaatgtacctggacttttaaaagagtcatcagagagcagagaaggggcaagcctttccaacttctctatttactgttgcctgtcaattattaaccatattccatggctcgccgatatgtcatcaggcaggatgccgctccggtcgcccccatctccgggatcgactaccgtacggccctcaatgaagaacagtacgccgccgtttcttcagaaccggggccggctcttgtcatcgcaggagccggatcgggaaaaacgcgcacgctgacttatcgcgtggcctggcttctggatcacggtacggacccatggaacattctgctgcttaccttcaccaataaggcggcgcgggaaatgacggaacgggtgcgttccctgattcccctggacttgtcccgcctgtggagcggcacgttccattccattgccaaccgcatcctgcgccagcatgcggaatacctgggatatacaccggcttttacaatcatggactccgacgaccgcaaatccatgattaaaagcgtggtcaaatccctcaaactggatgagaaatccacccgcttccccaagccggaagttctttcatccctgttcagtctggcagacaacgagggagccaatatccgggaaacgcaggaaaacgcctatccctatctttccaaccacctggacgccatcctggaggtgcatgaccaatacgtagcccgcaagcaggaaaccaacagcatggactttgacgacctgcttctcaacgtcgtgaggctttttcaggaacaggagcacctgcgtgccctgtacggttcccgcttccagcatattctggtggatgagtaccaggacaccaattacctccagagccgcctcatcgacatgctggcccgggaacacggccagctgatggtggtgggggacgatgcccagagcatctactcctggcgcggagcggacatggaaaacatcctcagcttcactacccgctatccggcggcaaagactttcaagatagaaaccaattaccgcagtgtgccggaaattctggaactttccaacgcggctatcgccgccaacgaagttcaaattgaaaaacagctccgctccgtgcggcccaccggggaaatgcctcccgccctcgtcccgctcaacgacgaccggatgcaggccaaatttgtcgtccagcgtatcagggatctcattgaagaaggcacggaccccagtgaaatagccgtgctttaccgcgcccacttccacagcatggaattgcaaatggaactgacccgcggagaaatacctttccgcatcaccagcggcatcaggtttttcgagcaggcccatattaaggacgtggtggcatttatgcgttttgtggtcaatcccagggatgaactttccttccgccgcatggtgatgctgctgcccggcatcggccccggcatggcccaaaaactctggatacgctggaccgcctgcccggaaagccggcaagaaacccctccggaatccttttccgccctgatgctggatttcccggttcctgccaaatccagaacggcctggacgcagctttgctacacactggatgaactggcccctgccggaaagctggccggaccggcctccatgctcctttccatcaatgaggccgtgtacgacgagtacatgcaggccgcattcgaaaattacgaccagcgcaggcaggaccttctgcatctggccggattttccgaacgctttgaatccacggaggattttctttcccagctttcccttttgggcaacacggatgatgaaagcgccgcggcggacttctccggtggctccgtcaccctgtccactatccaccaggccaagggactggaatggtctgtcgtcttcctgatcggcctgtgcgacggcatgtttccgcaccagagggtcattgatgacggagacctggccgggctggaagaagaacgccgcctcttttatgtaggcattacccgcgccaaggaccagctttacctgacctacccccgctggaactgccgcgcccagggaggaaccttcatgcaaatgccctcccgctttctggatgaattcccagccggcctggtggaagagtgggaggtggaataatccagatctcctctcccgggtcatatccgggaaacgccggttctcaatcttctcccgccggacagggaaaacgtggcgcggagtttccgaagggttcttttcccacccgtttgaattcctgcttccaacccttatccggagatatttccgtctttcccggagaacggaattccccgacaaccccggccatattccaaaaaccgtggacaccgcggctcttaccgcatccttccgtttctaccgctgcggttcatcaccgccatatccagcaaagccaatacccacttccgtattttgcttctcaaaacgcttgttgggaagcatcccaaaccctcttttcattcttgctggtttgcaaaattaaatatatagctttctgattttggcgggaaagcgcttagggaaatatttcatatgcgtttttgtaagtaagtatttacggaatatactgaaatccccacttcgtcatttcatagaatacaggcaacaatgcctgccccttttccgtaagagagtattcaacacggggcggtatctcgttgaattgcattctggatacaagcccgtccttttctaattctcgaagggaagaggcaagcatggtatttgtaataccattaatatttttttttaactcaccaaagcggatgggatcttgaataaacaattcataaaggatttgaaatttccatttcccctgcaacataagcagaagtggagtcacaggacaattccccgcttcagtcaaaattccctctttcacttcatgcctgtattcatcgtaggtcatatccttgtgcatgaaaaatgccttcctttctctattagtatagtcaaccgtactgagtcagaataatatgcgtacttgaaaaaaattttatccttagtataattatcttactaatagaagtcaacaagtaaagttaaatatttataatcgttttacaatgaaagaaatcaatataggtcaggcgacggctatcacctctcccaatcctctcgtgttggtttgcaccaaaaaagagaacggtatgctgaacatggctcccgtttcattcttcatgtactcctcgtttaaccctcctatgctggcctttgcaatgggtaaaaccgccaattccggtgaaaatatccgcaagaccggcaaagccgtactcgctgcccctggcgtcagcttgaaagatgcggtcatggcttacggctctaaaaacggcgggcagattgacaaactgaaggaatttccagtcgctctgcaaaacattgacggaacagacattcagatcccggaggacagccctattgcttttgtggcatcgctagctgaaactgtggagtctggcgatcattacctgtatctctgcaatattgacaaaatagtggcggacaaaacaaaagaagccctgttcgcatggaatggttatgccaaagttgccccggcacaggaaaaataatttgataccgtcagcggggttttcatggttttctgtgaaagccctgttcttttccaaatatcaaaatctggcgatggggatgatataataaagtgtataattaaaaaaaagcgacacttatgagccagttttctaattttcaaagtagaccggatcacattgaaatccgtggcgcccgtgttcataatctgaaaaatattgatttagatatcccgttgggcaagctggtaggaattacgggggtgtcaggatcaggaaagtcctctttggctttgggcgtactttatgccgaaggttcccgccgctatttagaggcattgtccgcctatactcggcggcgtataatacagatggcagaggcaaaaattgacagtatagaatatgtcccggctgcccttgctcttcgtcaacgtcccgctgttcccggtgtccgcagtacatttggaacggctaccgaacttttgaactcaatccggcttatgttttcccgcttgggaaatcaccgctgtcccaatggacatttgctttcgccatcggtcaatgtcgcggcaatgcgtccccttgtctgctctgtatgcggagcggtatttgacggtctcagcgcagaaagtttttcattcaatggccaaggagcgtgtcacacctgcggaggaactggaattgttcaagcagtagacgaaacaactttagtgcctgacgagtccctttccattgacgaaggagcagttgcgccctggaattctttgatgtggtcgctgatgactaacgtatgccgggcgatgggcgttcgaaccgatgtacctttttcggagttgacagaacaggaacgggagatcgtctttcatggtccggcagaaaagaaacatatcctttataaagcaaagagcagcaatcaagcgggagaaatggattttacctattataacgctgtttataccgtggaaaatgcccttgctaaagttaaagacgaaaagggaatgaagcgggtagaaaaatttttgaagcggaacacctgcccgaattgcggaggctcccggctcaataagcgggcgttatcaagtctgctatgcggaaaaaaccttgcggaaatcaccaaaatgactttaagcgatttaaccgcttggataaagacgatttctgcttccatgccggaagaactaaaaacaatggcggaaagtatctgcggtcaatttttgcatgtatcaaaacgtctttctgacttaggtctggattatattacccttgaccgggccggaacaacgctttccaccggagagcgtcaacgcgtgcagcttgcaagggctgtacgaaaccgtaccacaggtgttctctatgtgttggatgaaccgtctattggcttacacccagcaaatgtagatgggctgttgggcgttatagatgatcttattgcccatggtaattctgtgatattggtagaccatgatgtgcgagttttaaaggctgctgattggttaattgaaatgggcccaaaagctggagagcatggcggacagatagttgcacagggaacgattaaagcagtagcaaaaaaaacgagttcactcatcgctggatttttggcagacaaggaaaaaccggttatccgagaaacggcaacgccggaggccatgtttgcacatgggcatatcaaactgtctactgctcctttgcatacagtccatgcccttgatttagacatccccaaaggtcggctgattgctgtaacaggagtttccggttccggcaaaacaacactgattttggaaagtcttattcccgccatagaagctgccatagcgaaagcgccgatgcctgaccatgtgaaaagcgtggaggtagccggtattgaacgtataaatcttattgatgcaacacctattggcgtgaatggccgttctaccgttgcaacatacagcgggatattagatgatttgcgccggctttatgcagctatcccggaagcaaaatcaaaagggtataaagtaagtgacttttcctataatactgggtcactccgttgctttggttgtgacggaacaggtcaaattacaatggatgtgcaatttctcccggacgtggatatcatctgcccggactgcggcggctcccgctatgggaaagaagcggaggcaattcgttatcgctctaaaaaagacaaggtgaacgcacccggtatttctctgcctgtactgatggggatgaccgtggagcaggcgttagaacgcttatgtgacgtaaaaaaggttaaagaaaagctccaaattctttctgatttaggtttgggttatttaactttaggcgaagcaactcctgccctgtccggcggtgaggcacagcggctaaagctggcggctgaaatggaaaaggcacaggacgacgccatatttgtatttgacgagccaacgattggacttcatccgctggatgtacggatactaattggcgtatttcagaaacttgttgatgccggtgcaacagttatcgtcattgagcatgatttaaacatgattgccaattccgattatgtggtcgatatggggccgggaggcggcaaagcaggaggacaaattgtagcaactggtttgcctaaaaaaatcgctgaaacggctgaaagccttacaggaaaatatctatgtgaaataatttcatagaaacgtaaatctgtgggacgacggtaaaagaaaaagccgtcgtgcaacagcattttgatactcccaaattaaaaaacggcggtctcgggattctcaaagccgccgttttttatcctctctctgaatgtctgaccttcacggttctgcgcatatcaaggctcttttcgtaaaattagcaattgacctctccatatccgcgaaaataactgttttcaagaatttttagagataatcaaaattgttgctataaaaaataaattgacctggatgctcttgaaattccttcccggctcaaaactgaaaaaacatgtcatgattaaattatttgaagaagaaatataaccaatttatcatgaacaattttaattattattttcattaatttctctcatgtcattccggtgaacgaaccggaatgagaatcatctaaaatctcgggcgccgtgattgtcacgaacgcataaccatctaatcattaaacaaataaaaaagcatgaaattaagactcccacatatgctgctggcagctgttatcgcctgccttggcagtttctccgttgctacggcagctgactatgcagtcaacagtgccgatgaattcgttacggcctggaaccaggctgccgcttccaatgaagcttcaaccatcacgattaccgtaccttccggctccgataatattacgctgacccaggagcaacgagcccagttgaacgccatctccggaacgggcaacgtcaccattcaaatgacggacgccagcaacaaactggttaatttcaattacgatctggttaacaaccaagtcagtttcaacgacgtcaccttgagtgaacctctgggaagcgacaatgacattgtggtgacgaatgcttcaaataccacaactattgatggcaggaatattgccatcgaaggtacgaatgatgctgccaatcctaagacggtgggagccaccgtcacctccacgaacggacaggtaggcatcggcgacaatgtttccatggaaaaagccgttaccgtcaccggccaggcagctcaaaccgtagatccggcaacgccgccgaccggccaagcctataccaagacgacgtacaatacttacaataattccaacgaacaggccgtggtcctgggcaacaacgtcacgatgcaggataccgtaacggcgacaggccaaatcgtaagcgatccagcatccaaggttgcgctgaacggagatgtgacctccacagcgggaatcggaaccgtaactacggaacagtttgacgcctccaacgcccagaccggcaaaaccgtcatcgactctatggatgacagcgtctccggcggcatcattcttggagaaaccacagccggggccgtcaccctcaaaactgagggcggcaatatttccctgggagacaattccatcctggatggcactactgtttccgcagaatccgccgacctgaacaaaaccgtttacagcaatgacggcggcagctggaataccgtcgcaagtacggaaaagctgggcaccatcgaaggcagcgtcacgctgggtgaaaatactaccgtcaagggaaattccaccctgacagcggatgacaatatcgccatcggcaacaacagcgtcatcaccggcaataccgccgctgacggcgtgatctccgcaggtggccagatttccatcgaggacggtacccaggtcttggataacaccgccaccagcgacggcaaagccgccatcaacctggcggacgggcaaaccctgtacatcggctccggagcaatcctttccggcaatacttccaacggcgtttccagttccgtgcaagctggccaaaacacccagatcaacgtttatacggacgccaccgcctataccttcatcaatgacggcatctccaccacggccgccgcttccacggctgacgccgctccgctggctgctgaccagaccgtcatgacgaagaccggagcgggaactctcgtttacggcggcacaggaaccaccgatacgttcggaggaacctaccagcagcttgaaggcaacctgatcatcggccatgccaccttcggcgccgttgactccgccaccggaaaagtcggtccgctccagtccattgacggcgccgtaatggggacggacgatactgtttacgacattcggacgggacaggtgaccctggcgaagaattccaccatgaagggagcttccgccactttcggaggcgattctaccttgctgctgagcgacgggtccgtactggacttcggcactcccgccacgttccaggataattcccgcgtaggcatccaggtatccgacgccagcggcaatcccgttccgctcgcccaactccgcaaggggacggaaagcgtgacggtcacgctgaacggcacggacatttctggacgcctgctgaacaacgtatttctgagcaccaccatggctccgggaacggcggaaggcaccaccaccatcacccaggatatgaagggcattgacggccccatgtccggctacaacggcaacgtttacaccgtagcggccgctctggaaaacaaccgtctgaatgtggccgccggttctcccgccgcccagttctatgaaaacctgttccgggccacgagcgcggatgaagcggcccgcatcatccagtccgtcagcggtgaacacgtggtgaacttcacctgggcagccagccgcaccgtgcggaacttcgccgacctggggcgcattcaatccgccgcctccatggcacgccagacggaagacaccgttgaagtagtggacgccaagggttctccgatcgcccgcaagacaatcgccagaggcaacggcaatatctgggtgggcggcatgggaatctgggatgaccaggatgcccgtgacggtgtttccgggtataagtacaatgccggcggttatgccgtaggcattgactacaaagccgctcaaggttccctgatcggcatcgccgccggtcaaagcttcggcagcttcaaggataagacaggcatcggcgccgactacgacgtcgattccttcctggccatgatttatggacgcatgcatcccttcagggacagcaagttcactctggacggctacggcgcctacggacgttcccgtttcaaaggtgattcctacatcatggggtccgccgccaacggcagagcagatacggacaccttcagcggcgccctttacggcacctggacggaacgtttcgcactcggcagggcttttataacaccttacacgggtattgagttcatgacttccgaactcaagggattctctgaaagcggaccttatgggcgcaccttcggccacgcccgggcccagaactggaccattcctgtcggcattacgatcgcccgcgcctaccagacggacggaggcaccaccatcaccccggccttgacggtagccgtatcccaggatgtgagccgcatgaatccgaaatccaatgtcgccggccccctcggaacctggaacgcccgcggcgtcaatgttggccgcaccgcattccgtttgaatgccggcattgatgtgctcttctccaaccagtggggagcacgcgtctgctaccagttcgagacccgcaacaagctgaccgcccacggtatcaacggcgccctcagctatacgttctaagtaggagagcgctccagcgcatgcttttacttggttatggtaggccctttcccgccccacgcgggaaagggttttccgtatgtttccgcatccgttcttttaattcctctgcggattcccaattcgaaaaataaatccacgtctctttattatgcataaataattggaattgtgaattatataatggttttaaatttcccgcaggaaagtttctggttataagacgactctgttcatgtatttgtataaacatctcgtttttatcgtttagtgttgacttcggattgggaatccgttacccgtgcttttttgaagtacctgatcaacatgaaattatctacattctgcatcttatgttgcctttccgcaggtctttcccaggctgccacctacgtctggagcggagcggcagggaacggaatttacggagattccaacaactggacggtcaacggcgcgccgaacggctattatccgcaaagcaatagtgataccgccatcatcggagaaaatgccggaacgatcacctggtccaccgggcaatcttatttcggagccactaacacagtccaaatagactccggaagcaccctgctttgtacaacggaaataggagatctcaacgttaattctttcacgctgaaaggcaattcccaattgatatttgaatccagcaacgcccttggactgggacgtgatttcacgctgaacttcggcacgtttacggcggaggaacacggttcctgggttgccacggatctccccagcttctggaccaatgggaaaaccgtcaccttcgtcggcacactggatatgaacaacctttccggaagcggaactattgaactcgcttccattaaatcttcccaactgggaggcaatctcaatttggacctgagcggcctggacattaccggcaacaaccaaattcaagcggatgtaacacaggtcacggaaaacgacatcatcaaggtgttgattaactacgaaaccgttccggaacccgcaacggccacgctgagcctcctgggactgggcggtctgctgttaagaagaaagagacagtagcctcttccgcatgtctgattccaccccggcttattcctaaaggaaagccggggttttcttttgccgctggcccggtttgcgcacgcctcccttataccgcaacatttatcctgcagaaccatatagcattcttccagacggaaaaatccgttttccggagcaggtcagaaatcgcaattccgcggggtacgggtaaaaggcaggacgtcgcggatgttggtcaccccggtcacgaacatcaacaggcgttcaaacccggccccgaatccggcgtgcggcaccgtgccgtagcggcgcagatccgcataccaccggtacgcttccgcattcatacccatgctgcgcatgttttcctccagaatatccagccgctcctcacgctggctgccacccacgatctcaccaatgccgggcaccagcacatccatggcggtaacggtctttccgtcttcattcaggcgcatatagaagggtttaatctccttcgggtagttgtacacgatgacggggcatttaaaatgctcctccgtcaggaagcgttcatgttcgctctgcagattgatgccccaggaaacggggtaatcaaatgttttgccgctcttgagcaggatatccacggcttccgtataggaacagcgcacaaacggcgtttccttcacatgctccaggcgttcccgcagccccttgtctacaaaacgggtcaggaattccacttcttccgcgctgtttgccaaggcatcgccgacgagaaaacggacaaactcttccgccatgtccatgtctccatacaggtcgcagaatgccatttcaggctccaccatccagaattccgccgcatggcgcgtagtattggagttctccgcccggaacgtggggccaaaggtataaatgttgctcagggcgcacgcgaacgcttccccttccagctggccgcttaccgtgaggtaggccgccttgccgaagaaatcccgggaggcgtcacgggaagcagcgtctcccacatccaaagtcgtcacgcggaacatttctccggccccttcgcagtcactggcggtaataatgggagtgctaacccaggaaaaatccctttcctggaaaaagcggtggatggcgaaggccagcctgctgcgcatgcggaacacggctccaaacaggttggtgcgggggcgcaaatgggcgatggaacgcagaaactccggcgtatgcccctttttctgcaagggataggaatccggaacagcccccaccagctccagggaagcggcgcgcaattcccatcgctgccttccctgcccggcaaccagagcgccgcggatgctcacggcagaccccgtagccatttctccaatccgttcatagccggggataccctcatccgccacgacctgcagggaggcgacggaggaaccgtcattcacctccagaaaggaaaaagccttggaatcacggcgcgtacgcacccatccctgaatcagtacgtccggcatttcctcctcactgtccaggacatgtttcaccaatgttctgttcatcatggcgcaagtataatacagcgccttgcccatgccagcagaattgcttcaccacggagagaatattacggattttccggcagagaaggaggggatatgccgcacctgttatttggaaggctgcatgacctgccgccccgtcgtaatggcgatggcatccgccagcggcatttccttctccgtatgggcggccccccaggaatctgaaaagataagcgttttcttttcctcgtcaaaaccgataatcagcctcaaatggcctccgcgcgtctgggacaaacgcaacggttccggaacaatgccaagctgcacggaccaaaacacggggatgcccgccatgatatagggcctgatggcattgagccacctgtccacctgggacggtgatccggcacgcgccagcttcaggacttctccgtccgcattgtcccagaaaccggaccagtcatgttcattttccaccttctcttttttcagcttggaggcggcgcggttataggctttcagcagattcctgaaatcacgggaattcgccagggaatccagcactttgatccgtatctggaagcgcgtcccgatttttttcaggttttccgccattgccgccgtattagtgcctccgtccgcagaggtattggccagggaagccagttcatgctgatccacatagtccattccataataggcaaaaatgcgggcggcggtagccaccacgcaataacctttctggccctggtccaccatgggaatatcctgaatcaccacccgctttccttctttcctgacgtgctgcttgatatccgcctttctggcccgggaagaagcatctcccctcgcgatggaatcttccgtgggaccggccttcatccggataaattccgcttcaaactccctgccctcccgcgatgtattgatctccagggtaatcgccccgttgtcccaaatccaggaccagccgttgactttgactaccgcctccttacgggaggcccggtactccttgggctgaatcccggtaagagcggtcagggattccttgatgagctccaggcgcttgtcaaattcatccttgccaatggccccgttatcccccttgttgtacatcatgacagtcattgactggggggctccgtccttccagttcaccagcatttcccccagggacatgtcccctatcttgatggagggcttcgcaatccggagctgggtcttgcctttatccacccagccgccgggctctccgttaaaatactttccgaacaaatccggctgaggcagcttccagaacgcaccagactttaaatccggcgccatgttgcccgcgccccaagcggagggaagaaggcagcagactgaaaggaaaggcagaatggcagagataaatcgcataacgaaaaaaggggcggggaatagccccgctgctcggaatctacgctggtaatgtattctcccatgacggttctgccaagaaaaaatgaatcttcctccagcgaaccattccttctttatcctctcccatccgtccttttctaataatgctgcccggtaaaaaaaccggcctgccgcagtaaattccgcagcaggccggtttgaatgaataaaccagtccgatgatttacatgaacggacgcaaacgctgcatgatagcgtccttggaagaagctcccaccatcgtatccatgatttccccgtccttgataatcagaagagtggggatagtgcgcacgccataggtggcggccagtccgttgttggcgtccacatccactttgcccactttgatcttaccggccaattccgtagaaagctggtcaataatcggggcgatcatgcggcagggcccgcaccatgtagcccagaaatcgacaagcacaggaatgtcggacttcagaacttcatcctcaaaatttgcttcagaaaatacgtttgccatagtaccgcttagagtatttcaacaatcattacgttcacttattcttccgcatcggcgccatcatcggaagactcttcggcagaaacgtcatcggccgtttcttcatcggcggcgggagcagcgggggcaggcttggagtctccgcccagccagccaaccatgctgcgggcttccaaggtgtccgtagcgtattgataaccgatgaaaacaagcgcaaaggcaagggccacaaaggagagaacattcaacagcgtactgggagccgcatccgtatcttcttgaaacttcctggccgtaaaggaggcggaagaaaccggagaggccgcgggtgcggtattcagcccgatggtggcctgcggaagctgtgctgtcgccatgcctgctccgggaggagtcagaggaacagtaggagcggcagcggcaggcgccgcgccagcaggaggaaccacgggggccacaggcgtagtggcggagccgagggcaaccgtctttaatcctccgccaagcttgatgcctccgccaagaccggcggggcgaaggggaatagtgggcgcagcggcggcaggcggagcagcaggtgccgcaggcgcggcggctaccggaggaacggccggagcggcaggtgccttgggcacggaaggagcagccggcggagtcggaatgctgggcggaggcggagtaccgcccggaatggaggggggaggtggattactcatatcggaaaaataactgtgctgaacgatagctctcgcttatttcagcccgtaaatcaagaaaaagaatgcgtagaacctgaattccgtgcaattttttttaatttgaagcgtattccatctcaaacacgctgtccggacttgccctgaaaagcgttctttcctacgctgtgtatccggcattatctcatatgaaacccattaccaaactagcttcctccaccctgcccgacggctccgttctcgacctatgggaacgggacggtttccactttcttttgcgcgacggcgtacagacagcgtccagcttttcccacggaagcaatgaagcggcggcagccatggcggcggctccggttaaaagagccaaccagccctccttccttctcgacggcctcggcctgggattcaccctgttcgccctgatggatcaaattcgcagggaaaaggcccgcttcatcgtggcggaaccctgcaaaccgcttatcgactggcacaaggaactgatgaaccaggaacgacccggattcctgcacgatccccgcgtcagcgtggaatttaccccggcgcttcaaatcgcccgcaagaatccgaaaagcttccacgccattctgtcccattccacgcacgaacgcatgaacctgagcgtagccgaagcttccgactattttgccgcactcaagcagggcggtctgctggtcattacggtagcccgcccggacacccgactttcccggacactgcaaaaagcggggttcgaagtaagcacggaagccgttccggcctcacataaaggaaagaaaaccgcttttcacaccgttattcttggaaagaagggacgtttcgtccccttctccgctcaccagtcctgatcccatcctattattatgaactgcacatcccttaccatggccggacttctggccgccctgtccctgggaattccctccctggcggattccattgccccgggcattcttcttcccaaaaaaaataccaaatccatttccttctcccccaaggggacctcggacattttcctgctcggcatcatgccgcagggaagttccgtcaagaaaggggaatccgtagctcaggcggacttccgcatactggacaatagtatcgaagattatgaacgcgccatcaagagcaagaacctggaggtgctgaaactccggtacgccctggaccagcagaaggaacgttccgccctggccctgcaaaaatatcagacggccctgacacggacggaagaggatcaaaaggattttctggaaaagcggaaggcccgcatgctggcggaagaagaggaacgcgtcaacaaagccctgcgccacatgtcctacaaacaggaagagctgaaccagcttaccaagatgtacaaggatgaccaggtggcggaagaaacggaagagatcattttgaaacgcctgaaaaatgaacttggggaaagcgaatttgccgttcagggagccaaactcgttgcggaactggccaagctgcgcaatattcatcgcctgggggaagactatgctacggcagtcaaggaaaagcagatggatctggaacaggcaaggaagcaggcggattttgatctggaacagaaaaagatagccctgacggaggcggaagtctccctgagacgccttcagaataagtacaatgaactgaaagcagaccgggaaatggcctctttcaaggccccggaaaacggcatcctgctgtacggcggatatgtggcggacaagtgggtggccattccggtggcggaaaagctgaaacccggcggcaaactgggagcttttgacaaaatcgccaccatcgttccgccagactcggaactgattgtccaggctactcttccggactccaccgctacgcccaaggtgggggaaaccgtcgtcatcaaaataacgaacatgcagattcccggcgttattacggaagccagccccattccgggagcagacggcaagcgccgcattatcatcacgcccaaggttcccgccagccagattttcgcccccggccttcccgtccaggtgaccatcaaggaccaacaggcctgatttcccttaacggatccccatgaataaagccgtccttttccttgccgcccttggagccagtacggcgctctgcgctcctgttccggcggaaaaagcggaaaaaagggataccattcccattgccagggttccggatgttccgcctccctcccgggaaacgctggacgcttctatccggaaggcggctgactttctgttgaaagaacagaacagggacggttcctggggaaaccatacgcgcaccaagggtctgaatgttctctgcccttatccggaaggccccagatcattcaggacagcctccacctctttgtgcgtgatcggcctcctgaccagccccctgaaagaagaccccgccgtcaaggcatccctggacaaggcgctgcagtacctgctaaccacgctgcccaccctgaaacggggagacacccgtaccgtgcttggcgtatggggccatgcctacggcctctccgccctgagccgggcggcgcggaaccttcctgcggatgcccctttgcgcgaagaactcaaaaaggtggcctccctccaagtcaaagcgctggaccagatggcggacgtccaaggcggctggggctattacacatttgaaactttttccaagcgccccattggggaacccacttccttcctgacggctacagtccttcttgcctacaaggacgcggaacaggcctttggcctcaaagcggaaccccgcatcgtcaaacgcgccgtcgcctgcctggaaaaactgaggacgcccgccggcagctacgtctattccctttcccattccttttatcccggcaggcccatcaaccgccacaccggcagcctggcccgcactcccgccggggatctggctctgatgcggtatgacccgtcctttatttccaggagtcagctggaagacggcctggaacgcatctggagccgcggcggctggctttcgctggctgtaaagaagcccattccccatgaaagctttgcccagaacgcgggctattttttctattacgggtattattacgccgcccgctgcctggaggaagtggcgccggaacacctggcacgccatgcggcccatctggcaagcgacctcctgcccatgcaggaagaagacgggtcctggtgggattaccccctgtacaattaccacaaattctacggcaccggatatgccttatatgccgtctcccgcgtcagagaatccctgtatccctctgatgcggcaacaacttcatgacccatgttccgcccgctgacgaccatttttctcgccaccttgtgcctgcatcttcccgcagcgcagggggaatccgtgccagaggaaaaaacggatgttattccaatcgccaaaatcccggatatttcccccgcaaaacccggacaatttgacagggcattccgccgcggcgtggatttcctgctgaaaacgcaaaataaggacggctcctggggcgaccaccgggtaatcggcacctggaacatcctctgcccctacccggacgggcccctcaccttcaaaacagccagtaccgccctgtgcattgcagggctcaacgccagccccctgcatcatgaacccgccgtgcaggaagccatgacccgtgctgaagactatctaatccgtacgatgccccatctgaaacgcggcgacgctctgtgcgtttacaacacctgggcgcatacttacgtgctggatgccatgagcatgagggctgcaagactggccccggacagccttcgctacagggaactgaaggaatgcgcccgctcccaggtaaaaaaacttaatgaactggcttccgccatggggggttggggctacctcacttattccggcttcagcaaacgccctgcggcacagcccacctctttcctgacgggaaccgtccttatctccgcctggatggcaggaaaatcattcggcctttcccttgatgataaaatattcacccgcgcgctgaaattcctcaaatcccagaggacgcctgcgggaacctatgtttattccctttcccattccttctatcccggcaggcccatcaaccgccataccggcagcctggcccggactcccgcctgtgattacgccatcaggctctgggaaccggaggacatctccctgcgccagcttgtggacggcctggaccgcctgtggagccgcaggggatggctgacgatggccctgcacaaaccaactccccacgagagtttcgcccagaattccggctattttttctattacggatactattattcaggaatgtgcctagacatgctggcgccaaaccaggtaaagcgtcatgcatccctgttggcggacgatattctcacccgccagggaacagacggggcctggtgggactaccccctgtataattaccacaaattctacggcaccggatatgccctgtacgctctttcccgcgcctgggacaagctgtacggccaaccggaaccttctccatcctctatttccacactatcccggccatgataaataccatgaaatcgcttttggcgctctgcctgttttacagtgcggcttccgtctccaccgcagaaaccccaattaaacatacttccttcagacccggagaaatctggacggacaacaacggcgcgcacatcaacgcccacggcggcggcatcctgtacgacaagggaacctattactggtacggggaacacaaggtggagggggacgcgggaaactatgcccaggtaggggttcactgctattcctccaaagacctctataactggaaggacgaaggaatcgccctgaaggtggtggagggggatcattcccaccccatcgccaaaggctgcatcctggaacgccccaaagtggtttacaacaaaaagaccggaaagtacgtgatgtggttccacctggaactcaaggggaaaggatatggatccgcttacgcaggggtggcaacggcagcaaaacccacagggccattcaagttcctgaaggccgggcgaatcaatccgggcaaatggcccctgaacatggataaaaagaaccaaaccatggagacattcaaaggggtacccggcctgacttccagcgcactgcccgaaggcgtacgttccgaggatatgttcaagaaggattttgaaaaaggacagatgagccgggacatgaccatttttgtggatgacgacggcaaggcctaccacatttattcttctgaagaaaatagcacaacacacattgcggagctgacaccggattacacggggcatacgggaaaattcgtccgggcatttcccggacgcttcatggaagctcccgccatcttcaaacataaaggcaaatactatttcatcgcctccggatgcacgggctgggctcccaacgccgcccgcagcgccgtggccaaaaacatcgccggcccatggacggaattgaaaaatccctgcgtgggccccaaggcaggcatcacgttcggcggccagagcactttcatcctgcccgtgcagggcaagcccggaaaattcatcttcatggcggacatctggcgaccgcaaaatgccattgacggccgctatatgtggcttcccatccagtttgacggagaccagatcaaactggaatggaaggacgaatggacgctgaaagacatgtagtacgtttacctccaatacatatgaaaatattaacagccatcctttccgctaatctggcatgctgccttttctccgttgccgcagcagaaaccccaattaaacacacctccttcagacccggggaaatctggacggacaacaacggcgcgcacatcaacgcccacggcggcggcatcctgtacgacaagggaacctattactggtacggggaacacaaggtggagggggacgcgggaaactatgcccaggtaggggttcactgctattcctccaaagacctctataactggaaggacgaaggaatcgccctgaaggtggtggagggggatcattcccaccccatcgccaaaggctgcatcctggaacgccccaaagtggtttacaacaaaaagaccggaaagtacgtgatgtggttccacctggaactcaaggggaaaggatatggatccgcttacgcaggggtggcaacggcagcaaaacccacagggccattcaagttcctgaaggccgggcgaatcaatccgggcaaatggcccctgaacatggataaaaaggatcagacgaccgaattcaccaaggaaatgcccgactacgtccgcatcatccgcagggactatcccggcgggcagatgagccgggacatgaccatttttgtggacgacaatggaaaagcctaccacatctattcctcggaaggcaatatcacccttcacatcgcggagctgacgccggattacacggggcatacgggaaaatatgtccgggcgttcatcaaccgctacatggaagctcctgctatttgcaaacacaagggcaaatactatcttatcgcttccggatgcacgggctgggctcccaacgccgcccgcagcgccgtggccaaaaacatcgccggcccatggacggaattgaaaaatccctgcgtgggccccaaggcaggcatcacgttcggcggccagagcactttcatcctgcccgtgcagggcaagcccggaaaattcatcttcatggcggacatctggcggcccaaaaacgccattgacggccgttacctgtggctgcccatgaaatgggagggtgaccagattatcctggaatggaaggatgaatggacgctggatgacctgtaaatttatctccttcctttttatgcaggatacggtttattgcttccatctccttgccggaaggcagaagcggagccttctgtatgccttgtgctccgctctccttattgcagcagtctggctgctttatccggaatggcctttctgggcgggctacattgcctgggcactcgcttacgcagcaacgctgattgttcaacacaccattccccttcccatccgctgcccgcactgcggaaacgccgggctttattctgctccgcaaactccggaagaacaaagaaggccggatacaggcatcatgctggaatgccggagttgcggttccaccttttacacggacgcctatttgccctggccgggaaaaattatccgccggcgccccatttgcccggaagaatgggaagaaaaatctgcccgtaaacaagccgggcccgcttcctccggagaggaacgcaggccggaaaggtctttcgtcaacggaggaaaaatctaacgggcttttttggaagccatcacgtaattcctcatgcgctggtctgcgggggtggtggggcgtacgctggtaacccaattgccggccttatccttctttttgatttccgttctgtcgcggtacaatttcgcggagaaatcgctggaatcaagaacaaccggccccggacctgtcgtgacaatgggagtgggaggaacctccgcaaccaccgtcattggagcggcaagggaattataccagtacaccagttcctgctggccgacaggatcgtccggataaggagcataagctccgttattggtggaaacctttacataggccggttccggaaatgtggtctgataggaagagggggaacaggcccccaacaacaaaaggccggctccgccggcaataatcatggaatgcagtttcatataggcattggactcccttccgccacctgccgttcagaggatgtacggttccggaatattacgggcacccgcgcgtcttgcgcttgagcgccattcccagcgccgtacgccatcatgcggaggaaaggagcttgccgtccccccggcggcatggttgaatattatttcctctccatgattacggatttccggctgaaagtgtttgaaaccgtcgcacggcgcctgaattttacgcgcgcggcggaagaactgttcatcacgcagccggccgtcacccggcatatcaaggaactggaacgtctgctggatgcccgtctgttcaaaagggagggacgagggattgccctgacggcggaaggcgtgcgcctgctggcccattcccgccgcatcctcaaggaatacgaaacgctggctgaagaaatatcctttggccgcaattcccctgtttccggcgaattgagcctgggagccagctccaccatgtcccagtatgtgctgcctccgctgctggccctgttcaaccgccattacccggaaatacgcatatggctgaaaagcggcaatacggaggaaatagaacaggccgtccaggatgaatccgtgcagcttggcatcgtggaaggcacggcaacgcgcgcggacctgcattaccagccatttatggaggacgaaattattctggcaggaggcatgcaggccgccgtgcccagtgaagggctttccctcccgcaactctcccatgtgcccctgatcatgcgtgaaccggggtccggcacacgccgggtggtggaggaagcgctgaaaaaacacggaatctccgtttccggcctccatgttctgatgatgctgggcaatacggaaagcatcaagatgtacctggagcattctccggcgtgctcttttctctcctcccttgctgtccggggagaattcaaacgcggaagtttgaagaaaatacatctccgccacctggaaattcgccgcaccttccacttcgtctcaggacatggagaccacagcagaatcaatgaactgttcatcaagttctgccgatattattataacaaaatttaattggctataacaatttttaattagattttataatggctgcatcgtatattattccgcagccaattcggtacgctcccggccagatacaacgggcagccgcaaccatcatttaccgaccatgtctcccaaacatctagccaatcccctccacggcatcctgcttattgttctgttttccttttccgctttttacattgctgattttgaatgggtgaaacatctttccctcagcccgctgatcgtcggcatcgtgctgggaatgctttacgccaacagcctgcgcaaccaccttccggaaacatgggttcccggcattcagttctgcaccaagcaggttttgagaacaggcattgtcctgtacggattcaaactgacttttcaaagtgtcatcgacatcggcggctccgccctggcgctcgaccttattgtggtcactctcaccattcttctgggagccgggctggggcgcctgctgaaaatggacagggacacggccctgctgacctccatcggcagttccatttgcggggcagcagccgttctgggggcggaacccgtcgtcaaaagcaaaccttacaaagccgctgtggccgtttccaccgtggtcatcttcggcacgctctccatgtttctgtatccagccctgcaccgggccggaatactggatctgacgccggaacaaatggggctttttaccggagccacccttcatgaagtggcgcatgtggtgggcgccggcaacgccatggggcaagctatttccgatccggccattatcgtcaaaatgatccgggtaatgatgctggccccggtgctggtcgtcctgagcattgtcctggcccggagggatccctcttccggcgcaaacggggaaaaacggaaaattaccattccctggttcgccttcctgttccttgccgtcattggctttaattccctgcacctgctgcctgccggacttgtggacgccataaacaccctggatacattcctgctgaccatggcgatgacggccctgggcgcggaatccagctttgagaagtttaaaaaagccggagcgcggcctttcctgcttgcaggcttcctgtatatctggcttttcttcggaggttactggctggtcaagctgatcagcctctaaattctaaaaacattcctcctgcggaaagagggcaaggcctacgccctgcctttccgaacaggagaaaaaagccgtttcaccggcagaacgtgagaaccgtttcagcacaggttcaccgcctcgttccatcctgatttcctgccagaaaatccggttgaaaaggatcaccggagaaaccatgccggcatgggatgacggaacatgcggagcgccgcatcctgcccgcattactccctactggccacctgtgccgcccaatacagacatcctctctttgctttctccgctgctgcggcaggttttcccggtaaggctcaacaaaaattcatagtcaaaccgtttggagacgctatagtatgcgtacccagttcttaaaaacaaatggcaaccaaattattcattcccggacccactgaagtagcacctgaagtacttgccgccatgagcggcccaatgatgggacaccgatccaaagcggcctccgccctgcagcgccgcatttccaacaatctgcgccgcatcctgctgacagaacaggaaattctgctttccacttcctccggtacgggcctgatggaaggcgccgtgcgttcctgcaccgccaaacgcgccgccattttttccgtgggcgccttcggcgacaaatggtacaagatcgctacgggcaacggcgtgccctccgatattttcaagagcgaactggggcagcccactaccccggaaatggtggacgccgccctctccaccggcaaatacgacaccatttgcatcacgcacaatgagacgtccaccggcatccagaacccggtggaggaaattgcggaagtgcttaaaaaatacccggatgtcgtgtggtgcatggacgccgtgagttccgccgccggctcccggattgaaacggacaagctgggcgtggacgtactggtgacctccacccagaaggcgcttgccctgccccccggcatggctgtctgcacgctatcccaaaaagcgtacgaacgcaccgcctccgttcccaaccgcggctgctactttgacctgcgttccatttacgacactattcagaagaaggactaccagtacacgaacactccctgtgtctccatcatgtacgccatggacctccagctccagcgcatcatgcaggaaggtgtggaaaaccgctttgcgcgtcatgaagccatggccgaattcgtgcgttcctgggcggatgaatatttcagcgtctttgccaaccgggatcacctttcccgcaccctgacggtgatcagcaacacgagggacattgacatcgccgccctgaacaactccctgattgaacgcggcatgcagctcggcaacggttacggggacttgaagaacaaaacgttccgcattgcccacatgggcgagctgacaatggatgacatgcgctccatcacgtccagcatcgtggatatcctgaagctcaaataagccaggcccctgccctcttttccggctccgtccggaaaagagggcggaacgcctccgccggaacatgaacggaacaatcgccgggaacaggatacatcgcggatatcccggaacttgttcatctttgatcttttccgcatcccggcggcattcgtcatcgtccaaactttcaatcaggcacggtctttccgggacaacccgttctttcaggactccatttcacgttatttgctgctgttcattgcggcatgcattttggccgggcttgtttccagcattcgtgcgctatatcatccttcccattactgactttccgaactcttccttccatgtccactctccatcccttccccgccctgcgccctcctcgggaactggccgcgcgggtctcctccctcccctatgatgtcatgaaccaccgggaagccgaggaaatggcctccggaaatgacgcctctttcctccatatctgccgttccgacatcgacacgagcgaagccgccatccatgccccggaaacctacgccaaggcccgggaaaacctggaaaggtttgtccgcgaaggttacctcttccgggatgaacggccgtctttctacatctaccgacaaatcatgtgggggcgcgtacagacgggcatcgtcggctgcgcctccgtggatgaatatgccagcggcgccattaaaaaacacgaactgacccgcagggaaaaggaacttgaccggattgagcattttgacgcctgctccgctcagacggaaccggtattcctggcctaccgcaaacatgaaggtctttccgccatcatccgggaatggattaaattccacaaacccgaatatgattttaccacggaggacggcgtcacccatatcctgtggcccgtttccgagcccggcacggtggaagacatccgcaaaagctttgaggaagtggacgccctttacattgcggacgggcaccaccgcacggcttccagcgccgccgtttccgccaggcgccgccagaaacacccggactacacgggacaggaagaattcaactacctgatggctgtcgtcttttgtgatgaagaccttttcatcatggactacaaccgcgtcatacgcgacctgaacggcctgactgaagaggaattcatggaaaaactccgtacctcctttgacataaatcctgtggataccattcccggagaaggctacgccccccgcgccaagcatgagttcggcatgtatctgaatggacgctggtattccgccacggccaaaccgggaaccttcccggccggccatcccatcgaaagcctggactgcgccatcctccaggcgaatgtgctggctcccattctgggcattgacgatccacgcacgagcgaccgcatcgacttcgtaggaggaatccgcggtctgggagaactggaacgccgctgttccggggaaatggcgctggctttctccctgtatcccgtcaccatggccgaccttttccgcgtagcggacgccggagaaatcatgcctcccaaatccacctggtttgaacccaagctgcgcagcgggctttttatccataccattgaacaataatcttttccaccgtaccaacatgaacaaggtccttattcctaccaaactctccgacgtagcggccaacacgcttaaaacggccggctatgaagtcatccaggacgctgatacgcctctggaaaaacaggtagccgcccatccggatgtcgtggctctgatcgtccgcagcgaaaaagtcactccggaaatcatggacgcccttccttccctgaagctggtcgtccgcgccggagccggttacgacaacattgacattgtgtacgcccgcaaaaaaaacgtggacgtcatgaatacccccggggccaactccaatgctgtggcggaagaagtcatggccatgattctggcctactaccgccacatcgtccaggcggacgccaccacccgggaaggcctgtgggaaaagaaaaaatacatgggcagcgagctgaccaaaaagacggtgggcatcatcggcctgggcaacatcggccgcaacctcgtcaagcgccttcagggatttgaacccattctgctgggctacgaccactttctggcacgccagcgcgccctgaacatcggcgtcacccctaccagcattgaagatattttctcccagtgcgacattattaccctgcacgttccgggcggcccctccacccaccacatggtgaacgcggagctcattggaaaaatgaaagacggagcagtgctcatcaactgctcccgctacggcgtggtggatgaagaagcgctggccgccgccaaggccgcaggcaaaaacatcggctacctgacggacgtacatcccaaggacgcgcccggagagaagccttccgcccccattgcggatttgattcttccccacctgggagccaacacccgggaggccaatacgaaagcggccaaacgcgccgcagaacagatgatcgcctacttttccgacggcgacacctcctgcgtggtgaacggggaatcccccagcggcctcaatccggcccatcttcaactggcgtttctgctcgcctccctggcgcgcaaggccggcggcaacaagcccatccgccgcgtggaatgcactttttacggcaacctgcgcattttccgcaaatggtttacggcccccattctggaaggccttctgccgcatgcggaaaaagggctcatgcctgccgccgcggaagaatccctgcgggagcacggcatcgttttcaaagcgagggaacccaaagacgacaaaccttatgaagattccatcacgctggacgtggccatggaagaggaagaggaatatttccacaccagcgtgcgcggcgtggtgacggaaggcatccccatggtctcccgcctgaacaatttcaacggattgtacgcggacctgcgcggcacgacattatgcctgcgctacaaggatcgtccgggtgttatcgccctcatcggctccgccctgtcttccaatggaatcaacattgacaacatcgccgcccctgccgaccacgccaccagggaggccctgaccgtgattaagaccaaccagccggtttccgatgagctgctggataaaatcgcgaaagagatagatgccatctctgctttttccctgaatctttaacagggaaagacgtgtttccggaaacctgcttttcaggccgcccgcttccttcatctccagagggaagcgggcggttcttatttctgccatgttgacaaggcttacccatttttataccattgaccgaatcgtcggaacatatccatgcgttacgtactgcttctcctgaccctgttaaccgccggattttccgtctggtactatcaaaaccgcatttccccggaaggaaaggaactggccgcccaaaaaacaacattggaacaggaggccgcaatattggaaaaagccgttatccaatcccgaaagaagctggatgatgcccaggatgccacccgggcggcggaagaagacatagagagattccagcaagcttatctcgaacaaaaaaggcagcagcatcaggaaatccaggatgccgcctaccaaaaaaacgtggcggaccagcaggaagaagtgaaggaacacgaccagaagattgaccggctgcgccgccacatgaaaaggcaaagggaaagcaccaaatccgccagggaggaactgctccggaaaaaggagggaatgagaacccagcttgacaggctgaccgatcagcagaggggcattcaggcggaattggaacaggcggaacgcgaactggcccaaaaacgggaagaggccaaaagcaggaagaaattgtccgggattgcccctcagaagggaaatatttccgaacttcaggcacagatgaaccttatccgccagaaaaccgcagctgctaaggaaaaaatgaaagccgtagatgcggcgctggaaactctggaagaaaagtctggcaaacaggaacgcctgatgcagaaggcggaggagaaactcaccgaacagaaaaacaaggttctggccgacgatgaccgggacgaatccgctgtcccggaaccgggcgatgaagacttgctggcgtctgccgaatacagggagctgtccagagatgtacggaaaactctggaacaggcccgtaaaaaagaagaacaggcatcccgggcctatgacgaagcccgcgcggccatgcggaaagtctccagggaagaagtgaaaaagctggcaaagaaggaaaaagaccatgcctcctttcagaaactgttcacgggtgcagcctccgtcgcgggatttatcctgctcctgttcacgggtgcggccttccgcagcagcaacagttgaacgtctgccggaaaatgaaatgcacggagaacaaggaagcacccgccttccctcagggagtcgttgacggacggcagggatatgatagtctcaggccagcctgatcatgctcacactggcccagattcacggacaaccggaaattttccattccattcagggggaaggagtctcccagggaacaccctgcgttttcctgcgtctggcaggctgcaatctggcctgttcctggtgtgatacggcgtattcctggaacggaacggctcccggagtgcgcctcgcgcctgaaaaggcggctgaactggtgctccattatccatgccgccgcctggtcctgaccggaggggagccgctcattcagcaaaaggcgcttcccgccctgctgcgcctgttgccggatcatgccgtggaaatggaaaccaacggcaccatcatgccggatacggaactgctgaaacgcgtcacgcaattcaacgtatctcccaaactcccccattcaggcaataacgacgttaagacttggaaaccggatatcctgcgctgtctggcgggtacggagaaagcctggttcaaattcgtcgtggcgtgcgaggacgatgtcagggccgttctgcagcgggcttccgaagcggacattcccccggaacgaattctgatcatgcccctggcctccacacgggatgagttgaacgccatgcgtccgcaggcggtggaatggtgtctccgctacggtcttcgtttttcagaccgtctgcatatcgccatctggaacagcaaaaaaggcgtttaagcacgctcctgactcatcaggaaagacaaatgcttcccgcttttccggccggaattccgcaagcctccaaggctctgcgccatcgggaaacctacgctttctgtttcaaatccagcagcatctgggtattgctggggtatttgttcaggaaaaacaggaaccgttccatggcttctacgggtttatgcccggctaaagcgcggcgaatcagattcatcttgtacagccatgcttccggcataatgagctcttccctccgcgtccccgatttcagaatgtccacggccgggaagatatattgctccgcaatgcggcggttcagcacaagttccatattgcccgtccccttgaattcctggaaaatcaggtcatccatgcggctgttggtttccaccagggcggtggcaatgatagtcagggaaccggcctggcgcgtattgcgggcggcggcaaaaaggcgccggggcatttccagagcgcgggcatcaatgccgccggacatcgtgcggccgcttcccttgtcagcgttattgtaggcgcgggccaggcgagtaatggaatccatcagcaggaaaacatgctgccccgcctctacaagccgtttggcgcgttcaatgcaaagttccgccatgcggcagtgatcgcgcacccttccatcattggaagaggcgtatacttcagctccggggagggaacgtttaaactccgtcacttcttccggacgctcgtctaccagaagcaccatcaggtgaatggaatccctgtaattctccagaatggcttccgccatgtgctgaagcagcgtcgtcttccctgcgcggggcggagagacaatcaggccgcgctggccgcgcccgattggagcaatcagatccaatgtgcgggtggtgtaacgctccggccgggtttcaaaagaaatgcgcttattaggattgaccgccttgagctcttcaaagtgcgggttcttgcgcgctctctccggagcaaccccgttaacggaggcaatttccgtcagaagaatgccgcggtcatgacggcaggcctgcccatgcacccacacggcaggacgcagaccgaacctgcggatcatatcctgcggcacataaacggcttccgcaaaagcgtcaaaatcattatccggcttccttaaaaagccgaaccccttattcgtaatttccagcaacccgtccaccggttccggcggcgccagttcacggggggcgctgttctgtggggttccgccctcctgattattattccagcggtttttaacccggtcattgccgtttctgccattgcggccatcctggcggttattccggtttttgttgaaacggtcgttgttattccggcggttctgcctgtcaaaacgctgcctttgcggctcatttgtccgacgcggctcccgggcggcatcttcggaaaaatccgccgcaccttcctgcaccaccttgatggacggaacggaagcatccgcctccggctcctgttccctcggtttcctcacaaatctctggcgaataaccttcggcctgccttctgcgggctgctccggaacagaatcggaagaatcggaagccggctcggcaggcgccgcatgaacggcaatttccgcctcagggccggctgaatcaccgttctccggagcaacagccttggcagcacgcctgcgcaccggcttgacggcggcttccgttccggagacaatcgcagagccgtcagtttccggaacctcctccacaggcttcttgcgcgggcgtccgcgccggggcctggcaggaacatcctgcgcttcttccaccgggatttcagcactgctcttacgggaagtcttcttccccggcacatcgacactttccatcccatcatccgccaattcagcaaccttcttccttatcgtccgcttgcggggcgccggggaagaatcctgttccgtcccgggcacttccgcagcagtctggggctttaccggagcttccgccgcagacttggttttgcggataatacgttttttgggcgccggctccggagaaacctgttccggagtcaaatctgggggggtatcagacatggaaaagaaaattgaactgcaacaacaggcgtctcctgaaggacaacagcgttaaccaagctgctcaaggatttcttccgccacatcgaaattggagaagacgttcagcgcgtcatcatagtcgtccagcgcttcatacaggcgcagggcggcctttgccgtttccagatcattaatcacggaagcattctgcgccacggaaatcagcttcatggaaattaccgtatgtccggcttcacgcagggcggcgcacacgttgttcaactccgttgggctcgtaacaaacacccattcattgtcggaatccccctgttccacatcatccgcgccgcattccagcgccagatccatggcggaatcctccgtaagaccttccgccatgatgcgggcctctcccttgcgttcaaactggtaagccacggaaccgggcgtaccgatgctacctccgtttttggtgaacagggtacgcagctcggaagcggaacggtttgtgttgtccgtcgccacttcaatcaggaaagccgtgcctgaagggccgtagccttcataggtaatctcctggatggtagctcctcccagttccccggtgccttttttgatggcgcgttcaatattttccttgggggtggacacggccttggctccgtcaatggcggcgcgcaggcgcggattcagatcaggatctccgccgccgcttttggcggccagcatgatttcatgggcaaagcgggcaaaaaccttgcccttcttggcgtcttccttagccttaacgtacttgatcttagaccatttattatgtcctgacatagaattgggaataatagtaagtgtaggtgaaaagagacaaactaacaagtggaactgttctgcaacccggggaacacattgtcatttgcaaataccacgcaggaagggaatcagggtgcggccatccgtaaatacgttacaggtaccggatactctgccggggaacacgccgcgcaccttcaggagctccggctacctcttggcagtcactctcaacacacgcaaaataacgtattccccagcattggcaatacttttttaggtcacggcaaccggctgctttcagagctatcttctaccgccttcaattaatttttaatatattttgattatttaaaataataaatactgtttctttaatagtgaaaataaaaaaatatatccgcacagcaggcccctgttacacatccagccctgatggtgcagggggtgattccgtcataggccaaagcctgagttctaacgccgcctctgttatcattgactaagaaagggaggcgggcttagatatgcccttctttctttttccctgtcttatggaacaagcagcgcaccaggaaaaatcacatgcggccctttcctccgtcctgtggtccgcctttttaacggtcatcaagctctgggccggcattgtaaccggcagcctcggcatcatttccgaagccctgcacagcgggctggacctgatggctgcggccatgactttttacgccgtaaaagtagcgtcccgccctgcggacgaaagccacccctacgggcacgaaaaggtggagaatctttctgccctggcggaaacagccctccttttagttacctgcgcctggattgtctgggaggctgtggaccgtctgttctacaatgaggcggagattaccctcacctggtgggcttttgccgtagtggccgccaccctgctggtagatgtgaaccgttccgccatgctccgccgggtagccaaaaagcacaaaagccaggccctggaagcggatgcacttcactttaccacggatatctggtcttccgcagtcgtgctcctgggtcttttctgcatatggctggcccatctggtccccgcggaatcagcctggcacggcctcctggagagggcggatgccattgcggccctgtttgtggcggctctggtttgttccgtggctttcggccttgccaaacgttccatccacgccctgatggacggcggttcttcctccctgacgcggcaggtgctggacgccatgaaaaagaatgccccggattatccggtcaaacgcatccgcctgcgtgacggaggctcgcgcatctttgtagagctggatgtggaagcgcctgcggaactgcacgtggatgacgcccatgatgtggcggaatccattgaaggcatcgtaaagcatgaattgccggaagcggacgtcatcgtccatatcgaaccggcgcgggagaatctttccaatatggagccggacatgattatccaccggttggccttgcgccaccatgtccgcattcacggtttttatgcaggccacggcaaacaggccccctgttatttcatggatgtggaaattccggcggattggcccctggaacgcggctatcatgtggtggaggctttcagggattccattctgcatgaactcaagccggaaaaggtaatttgccgcattgaaccggattgccgcgacatggaaacaagcgccattgcggaacaggtttctccggaggaagtgcgcctgaaggtaaatctcattctccagcaacacagaaacatccgcaagatcctcaagctggacctgaccagggaggacaatttcccaaccttgacctgtgtgtgttccgtggatgcctccctgactatccgggaatgccaccagatcgcctcgcagctggaaaaccagatagaaaacgcactgcaccacctggggcgcgttaccgtcattcttaaaccgtccaagctgggcagaagttgaatgactgttgccggattcccgtaaaaacatgttccgaatccgggaaggggaaacggtgtccattccgggcatgggaacctccgcccggacaaagcggagccaacgattatgaatggcccgcaacggagactccgggcatttccctgtccagctccgcgcgaatgcgctggcgctcggaaacgatctgttcgtcgtccgcaccgccttcccgcaggaaatattccgccatggacagggctacttccgattccgaggaaaaaacctgggaagcgccggcttccttcagtatatccacgtccctcatgtacttggtgtgaatcatcacgtcaatatgagggttaagctccagagccacgcctactatctccttggcgtccggaatggaagcggagagaatcaggctttccgcatattcaatacccgcatggcgcagaatttcccgctggctggcatccccgtaaacaatatcccctccctgctcccgtatagcggtaaccgtgtctatattcatttccacgatgatgacttccaccccgttgtcattcaatatcctcttaagaatgcgccccgtggggccaaaccctaccaataccacgcgccgcgcatccggagcgggcaaggccatgctgttcacgccccccgggtccgcaagccctatgccgcgtttttgcagccatttgactgcaggtccaatctgtcggtacaggatgggatttaaggaaatggagacgacagccgccagaatgatggcctgattggcatccggaggcaggatgttgtacatgagacctattccggcgagaatgaaagaaaattcacccacttgagccagggccacggatacgctcagcgccagcggcaccggccgcctcaggcaacgaacaaccacataagccgccagcggcttgccgatcatcaccacccccagcgttgccagggccagaggccagcaatcccccacggacatcgggtcaaacatcatccccacggaaacgaagaagagcaccgcaaaagcatccctcatcaacatggcttccgccgccgcgcgcgcgcagaagtccgactggcctacaaccatccccgccaaaaacgcccccaaaaccatggaagcgccaaagaattccgcggagcacaccgccacgcccagcgcaatgaccagcacagccagcgtaaacaaatcacgcgcgcccgttcgggccacgtaccgcagcaccagcggaatgacttttttcccggcaaacagcgtcagggccaccagcagggccagcttgacgaacatccagccaagctcggaaagaatgccgccccagtctccggcgccgctctggcgcgcttccatcacggcggggatgagaaccagcagcagaatggtaaacaggtcttccactaccagccatcccagggccacatggccgccgggcgtatggaggttctggttgtcttccagcacccgcgtcagcactacggtactcgccacggaaatcgccatgccaaaaaccagtccggaaatcgcggaccatccgaacatccacccgaccagcacccccagcacggtagccacggatatctgcacaacggctcccggcacggccactttttgcacggcaatcaaatccttcaaatggaaatggagccccaccccgaacatcagcaggataacgcccaactccgcgaattgttccaccgtatgggaatccgcaacaaatcccggcgagtacggccctaccaccaccccggccagcaggtagcccaccagcggggataaatgcagttttctggcaataaggccgaaaagaagggcagcggccaatccgccgacaaaagtgagaataaggctgaaatcgtgatccatacgcgcgtgacagggataaggggtattcttgaccgccaagtcgtttttacgctatcgcgttttattttccctcacaagaacgcattgcgccgcatggaaatgcagtcgcactttttgcatgaaaaatggccccggcaaattttcatcatatcctatttgcgaccgctcctaatttaattttcccatacgggattcctatcaaacgtgttagtaaaattcgtcctgttcattcccgggaagctgccgggtcattgtcccgcactggcggtcggacaaatacccatacatcaccatcggcaatttttacatcctgctgccggacaacggaaataatccgccggcccggaaaatccaaagcaggaacgcccgccgggcagacactttcgttttcaggctcttccatgctccatgcccatacccctgaacttggaaaaattgataaaatacccccaattccatttgaatttccaggaaattaatttattttatattggaaataattgattttttcaaatctatgactgaagatgccatattcaaggaacagtggaaccttcttaagaaggagatggcaatgggagacgctcatctccagcaaaggctggaacagttcattttccggcaatacggccgggcggttctgacgcattacattaaagccctttccgtcctggagctcagccgccatttctacctgcggttccgcaggaggagccgtgccgtaacggaacccattctctactggaccgtgcttgcggaaacaaccatccacatgacgctggagggagtaaaagacatgcaccccttcatctccctgccggcacgtgccggcgcaaccttccagcttgatacgttaaaagactgctaccttctttatttgagggaccggggatatccctgctggcccagggcctcccggagaagccgcatcatccggaacaaatggaacgctccggaactggaagccgcctatttcctccggttgtgccagaacagcacggaccgtcattatgccaacgtgatgaacatcctgctggaagaaatactgcatatgctgattaccctccgccaactcaggaaccacggaaaaaacctgctggaactcagaagaagccggaactccaattcttccccgggcggcgttccgccgccgtccctccgcccgcagcaccctccggaagacagtctttaaaaccatccgcgctttttccaaaggatacttgaaaaaaacgccgggatcttacaaaatcaacatgcagtctccataggagaaaaatctgtaccgttcccggatggcttccagataggctttcatgaccagctccctgcccgcaaaggcgctgacaagcatcagcagcgtgctctgcggcaaatggaaattcgtgatcagggcgtccaccaccttgtagttgtagggaggataaatgaagatgttcgttgaaccggaacactccctcaacggcagaccttccgccgttgccacatgttccagcacccgcacgctggtggtgcccacggcaatgacccttctggcgttattgactgcccgggcagcggcttcaggaagaaaaaaatgctccgtatgcatctgatggtcttctatcctgtccgccttgacgggacggaatgttcctacccccacgtgcagggttagaaaatcgtgggggacggatgccagcagctccggcgtaaaatgcagcccggccgtaggagcggcaatggccccttcatgcctggcgtaaacggtctggtaacgctccctgtcggatgggtcgctttcccggttcatataatggggaagagccagacgcccgtatttttcctcatccacttcccggtcaaaccggataaagcggtacccttcctcatcaatgccttccacggtgcccaccgcctctccgaccgcaaccgtacgcccaagcttcattttgcgtccggggcgcaccatgcacttccacaacaggggattaagaacctccgcgcgtactatttcaatggaaccgtcgttggaaaaatatcttgccggaaccaccctggtatcattcagaataaaatgatccccttcccgcacatattccggcaaatcgcaaaaatgcctgtgctcaatcatgcccgtatcccggtgaatgaccatcatccgggacgcggagcggtccggaaggggacggtccgctatcagttcttccggcagcggataatcaaaatcaatggtgcgcacggccaagtgcattgccacgaatcctccgaaaggtcaatacctttaaaccgcaggtaacacaattatatctttaccctgcttcggttcatatggtatggaaggatacatgaacaacctgctgtcagcaaacatttccaacgcaaccgcctgggggaccattctggtcgtcgtcctcgtcatctttctagtcatttttttcgccatcatcgccaaattcttcaagacatggctgcgcgcccgtctggcgaaagcgcccgtctccatgagcaacatgctggggatgtggctccggaaagtgccctatcccctggtggtggacacccgcattacggccgccaaggcgggcctggacatcagcacggatgagctggaggcccacttcctggccggcggcgacatcgtggactgcgtgcttgccctgattgcggcggagaaagccggcattccgctgagctacgaccgcgcctgcgccattgacctggccgtgaaaggcacttccaagaccgtgctggaagccgtgcgcacctccatcaatccccgagtcatcgactgcccgaaccccagctccggccaaacgcgcctgacggcggtggcccgtgacggcattgcagtggcggtgcgcgcccgcgtaacggtgcgcaccaacctggatctcttcgtagggggcgccacggaggaaacggtggtcgcccgcgtcggggaaggcatcgtctccgccgtaggttccgccccctcctacaaggatgttctggaaaaaccggaggtgatctcccgtaccgtaagcgacaagggggtggatgccgccacggcgtttgaagtgctttccattgacattgcggatgtggatgtagccggcaatgtgggcgcccgcctccaggccgagcaggcggaagcggacaaacaaatcgcccaggccaaagcggaagtccgccgcgccgccgccgtggccacggaacaggaaatggctgcaaaaacgcaggaaatgcgcgccaaggtggtggaagcggaagcccagattcccatggccatggcggaagccttccgcaacggcaatctgggagtgctggactacgcccgttaccaaaatgtggtggctgacaccaaaatgagagattccatcgctcaaccggatacgcctccctcttccatcaaataaataaattccctggtttccggaaaggtctgctttttccggaaacctttatcctttatggatttactggcatacatgctcgcctccggaggcgatgacaatagcctgaaactctggttctggctgattgtcggggtgattttcctcatcaaaaaagcaatcgaattgttgaaaccggatgaaaaggatgaggaaccgtccgttccggacacggagaaccatcatgaaaaacgcgtaagggaagtcattgcggaaatgcgccgggcaaccccgcagccgcagcaaacccaacctgccgcaccggcccgcgcaccgcggccctcagcccctcctgtagagcttccctcccccgccgtggcccgcaaaccgcagccgatcccggcgccggcggctgcacaacccgaggaaacagcccggcagacggcgcaaaatgtactggaacgctacgtaaaagctacggaagaagcccggcaatccatgcgctctctttccgatgcggaacaggcggctctgcaacgtttgcaaaagagggagatgaaggaacatctgcccgaccttcttccgtcatccgccgcagtggaatctccttccctgaaaaattcccttcaccaccccaaatccctgaaagcggctgttctttatcaggaaatccttggaaaacccagagcattacgaagcgcatccttcagcggtgaataaagaatggcccttcccgggccatgttccgttcagccgtcatgctgccccccctcttattcattctcccttgcctgaaaaggtaagcggaggtaccctccatcccgcaatgacagacacacctttgcagatagccggacgccagttcacctcccgcctgatggtgggaacgggaaaatttccttccaatgagagcatgaaagaagctctggaagcctccggcgcccaaattgtgacggtggctctgcgccgggcggatctgacgggttcccacgatcccgccgccaatattctggatttcattgatccggaaaaatacctccttctccccaacaccagcggagcgactacggcagaagaagccgtacgcctggcgcgcctggcggcagcagccgggctgcccaactggatcaagctggagattcacccggacgcccaatacctgatgccggaccccattgaaacgctgaaagcggcggaaatcctggtcagggaaggcttcaccgtgcttccctacattaacgcggaccccgtgctcgctaaacgccttcaggaagccggagcggcggccgtcatgcctcttggcgcccccatcggcaccaacaagggagtgctgacccgggagttgattaacatcatcattgaacaggctattgtccccgtggtggtggacgcggggctgggagcgcccagccacgcggcggaggctctggaaatgggagcggatgccgtgctcgtcaatacggctatcgccgcctccggctctccctccgccatggcggaggcgttcgccctggcatgccgtgccggacgcatggcttatctgtccggccttcccgccgtttcctcccaagctacagccaccagccccctgacttccttcctgcattaaaaggccgggaaaaagccccggttttctcccgcacccatgggtcaagaaactccgggaacatttttcgcaatctttctgcgtatcaggaattccaggatgaagcaggcggctacaaacagcacaatcaacggaatcagataaggctggctgaagaacatctggtaaaagaacgcccccagaataaacagcatcagaagaaagcccaggatgataagcagcacatttccctgagtctctttccggagccgccaatgggcgacgaacaccgccaggtagctgatcagaaaacaggcccccgccagattggcgatggctaccaggttaaaggcattcgtcatcactagaatccccagcaaaagatagaaaaaaccctccgttccgtggccccagaaaggctgtttaaaaatagctcccaactggccgttgtgcgccagagcccgggaaatgtccagcatgctgaacatggtggcattaatggctgatgccgtggcaatgagagccgctacggatacggccatgaagccccacatgcccaaaaccggataggcagcctgcgctacggccgtttccgtatggctttccagggaagtagcgggaacgttggacagtactacgtaggagagtatcaggtacagggccagcacaaggccaatagccataaaaatggctcttggcagcgtcctggaaggatttttcagattgcccgccgtattggccatcattccgtagccggcaaatgcgaaaaatgtcaatcccacgctgcccagcaaaccgtccagccctttcaccggaatgggatccgcgcccacaggcacggaagaaccgaagctggcaagcattaaaaccgtcaaaatcaataatttgaatgccaccatgattacttccgactttccaacggccctggctccccccatattcaatgcccccagcagcaaaatagccacgctggcaaaaagggccgtggaataaatggtgactgccctgtccggtaaaaacaggcgggacgcataggctccaaaggatttggccaccagggccacggtaatgaccagcgttcccagataaataagggtcagtgcgccggacagggtcttatgggaaaaagcctcgttgaaataatccataattcctccggaaccgggataacgggaacccagtttggcgtaagtgtacccggaaagcagggcagcaacgcctcccagaataaaggaccaatatacgttttttcccgccatcagggtcgcctgccccatgagggcgaaaattcccgctcccaccatggaccctattcctaatgcaatgacgctccacagggacagatattcttttggggccttcccgtacataagggatttagagatactacaggaatgaaacgttgacctttccgcacgggatgacacgtcctgcttattcatccgtcctgcagccccatcatgactattccggcgcggctttccccttgaaccgtccgttgtcggcatgtagggtacggctgatgatcaaaaccgccatttttgattttgacggaactcttgccgacaccatacccctgtgccgggaggcttttcgccgcgctatccggaagctggacggcagaatattgacggatgaagaaatcgaacgccaattcggcccggacgatctgggagttatccagaaattgattcccgggaaaccggaactgcatgaacgcggcagggaactatttatccactattaccgcaagctgcacgcagacctggctcccgccccctttcccggaacagccgaattgctgagcactctccgcaacctcggcattcggctggccatggtcacaggcaaacgcctggaaagcgcagagatatccctccagttttttcatctgtccgaattttttcctattctggaaacaggctccccggagggaggcgtaaaaccggaccgcatcaaacgggctttgtcccgtctgaatgccgtcgcctcagaagccatctatattggagacgcccccacagacgtggacgcatgccgctctgtccctatccgcattctctccgcaggatgggccgcagaggcggacatcaacggcctcaggaaaaaaaagccggactttctcctgacccgttttgaagacctggaacgtttcttccgggaacatcatgaaaatgaaggcctttaagattgcaatcctgcagaaaacaggctaccattacccaccccgttaatatcaatccttccatgacttttcagaaagaatccggaaaagagggcctgaaaattctgctcatgctcgccagcgtcattatcatcacggccgggctgcaggcgggaaaaccggtgctcctgcccatcgttctatccggctttctggcaatcgtcagttatccgctgacgacttttttcaaaagccgtctttgcttcccgcactggctggcagtgactttcacggtcatcatggactttggcattctggtgggcctgggctatctggcccaatacctggggcaggatctggccaaaacggtcacggtcaaataccagccccttatgatggaaaaaatccatgaactccgcgctttcctgattgaacaggactggaacaacctggctgaccagatgcttcaggaacttccggacctgctcaacggccagcgcatcgtggcgttttccacaggggtgatggggcagttagcttccatgctgaccttcactaccctaattctgatcctgatgactttcttcctgggggaagccccccgcttccgggcgaacatcaataaactggggcataacagcgacacaggtatccgcaaattctccaaggccctggccggagtccagaaatatctcattattaaaaccttcatcagcgcagttacagggcttctggctttcctgctttgctattacatgaacgtggactttccgctgttgtggggcatcgtggctttcgccctcaacttcattcccaccttcggctccatcatcgcggctatcccccccacacttctcgccatgcttctgatcagccctactgcgggcatcattgttgccggcggctacctggtgatcaacacagccctgggaaactgcctggaacccatgctgctgggacgacaattcggcattgtgaccagtatggttctgctctccgtcatcttctggggctgggtatggggccccatcggcatgctgctggccgtacccattaccatgttgattaaactcgggctggaaagctccaaggatctcgcctggatcgcccagctcattgacaaccctcccactcccagattccctctcccccctctccattccgggaaaaccaacgaaagcacaaccaaggaataatccatgcattcattcgcttacaaaaacggcacgctctactgtgaaaacgtcaaccttcaggaactggcggacaaggaaggcacacccctgtacgtttatagcaaacaaaccattttaaaccattttcaccgcctcagggaagctctggcaccgcttaacgcggaagtggcctacgccgtcaaggcctgctccaacatcgccatcctgaacctcatggcccgcaacggggcgggattcgacatcgtctccggcggagaactcttccgcgtcctcaaagccgggggagatccgtccaaatgcacttatgccggcgtaggaaaaaccgagcaggaaatccgttatgccctggcccagggcatttattgcttcaatgtggaatccgaagcggaactgcgggccattaacgccattgccgcctccatgggagtcaaggctccggtggccgtgcgcgtcaatcccaacgtagaggcgggaacgcacaaatacattactaccggcaaggctgaaaataaattcggcgtggacttcgaacgcattgaatctctttatgagatggcggcccgcgaacttccgaaccttcatctgaaagggttgcaaatgcatatcggctcccagcttacccaggcgaaacccttcctggaagccgtcaggaaagtcgcccccctggctgcttccctgaaagaaaaacacggcattgaatttttctccatcggaggaggaattggcatcgtttaccagggcacgctggattccggcgttcaggaatggtggaatgaggactgcgcccagctcacgctgagcacttacgcccaggccgtcgtccccaccctgcaacctctgggattacacatcattgtggaaccgggccgtcttatcgtaggaaatgcgggagcactcatcacgcgttgcctgtatgaaaaaaacgggaaagccaaaacctttaaaattgtggatgcagggatgaacgacctcatccgccccgccctctaccagggctatcatgaaattatcccggtcagagaacacccctccggatcctgcatcacagcggatgtcgtgggtcccatctgtgaatccggagacttcctcgcccaaaacagggacatgccggacgtgcgccagggagaactcctggccgtactgtccgccggagcctatggtttttccatgtcttccaactacaattcacggcctatggcggaagaagtcctggtggacggggaccaatggaacgtcattcgcagccgccagagctgggaagacctcatccggggagaatccattccggaataacacccccatcccgcccatctttagaatgcccttccagcgataaaacgaaggaggggcatttcctttcaaccgtactgaatggaaaacaaggcagaattttcaagtccgccaagccacgcggagcttctttccgaagacgccgcatgctactgccgtacggactccggcggaccggtccggccgcaagtcacaatgattcgaacatgaacatgtcccgcaagagcgctgcaaccccggcgtgcgcctgagttcagccttgccctcctgaaaaaaaacacctatcatatccccgttatgccaatagccacaccagaacaatacattaccatgcttgaaacggccaaaaaggaaggctacgcctatccggccgttaacgtgaccacgatcgaagtcatcaacggcgctctccgcgctttttccgaagccaaaagcgacggtatcattcaggtttccatcggtggcggcaaattcgcctccggcagctccgtaggcaattccgcccttggcgccattgttctggcggaagcaacgcgtcgtctggctgaaaagcacaacgttctcgtagcccttcacacggaccactgccagcccgaacacgtggatactttcctgcgtcctctgattgccgaatcccgccgccgcgtggaacgcggtgaagcccccctcttcaattcccacatgctggacgcctccacgcttcccatggcggaaaacctcaagctttcccgggaactgctgaaggaatgcgccgaactgggcatcgttcttgaaatcgaaatcggcgttgtgggcggagaagaagacggagtggacaactccggccatcccgccgacaagctttacacttctccggaagatatgctgatgacgtatgaagccctcgcacccctcggcaaattcatgctggccgccactttcggcaacgtgcacggcgtgtacaagcccggccacgtcaaactgaaacccagcatcctgcgggacggtcaggaagccgtggtcgccaaacacggagaagcggctcgcatgcccctcgtcttccatggcggttccggttccgaactttccgatatccgcgaagccgtttcctacggcgtcgtcaagatgaacatcgacaccgacacgcaatacgccttcacccgcccgatcgtctcccacatgtgcgaacacatcaacggagtgctcaagattgatggagaagtgggcaacaagaaggattacgatccccgttcctatcttgccaagggtgaaaagggagtcgccgcccgccttcaggaagccgccgacaaccttatgtccgccggcaagaccctctttggcaaaatctaaaaagagttccctcaacgaatttaatgccatgcccggtttcttaaaagaaaccgggcattttttctggaaaaacccaccaacagggtaaggcgggaaacgctttcaccgagtatttatccccctgagacgacgggaaaacgaaccgttccccgtcttcttcttttctgtcctctgggcttctccgattacgggaccattaacccgcattcttccgcaaggaaaccgctgcgaacatataaaacgatagccgcacaggaaaaaccggaattattcataacagaacaaggccattccttcgctcagcggaccgcagggaccccggcgccgcttgaaccacaggagcctttccccagcgctccaggaactttaatttcctgctttgcgggattcccttacgcggtcattggcgttcaggatgcgcttgcgcagacggataaaatgaggcgtagcctccaccagttcatcaggttcaatgtactcaatggcacgttccagagaaaaaatgacgggaggggaaagctggatgccgtctcccttcgtggctgagcggatattgttcaaatgcttttccttgcacgggttgaccggcatatccatctgccgcgggttttcgcctacaatctggccttcgtaaatatcttcctgcggccccacaaacagacgcccgcgttcttccagcgctaccagcgcgaacggagtggaaacgcccgtctccatggaaaccagggtgccggtggtacgcgtggtgatgtccccggcataaggcccgtaatcccggaacaggtgggagaaaataccgtggccggacgtcagattgactagctcaaattcaaaaccgataataccgcgggtgggaatataagcctgaataaaagtatggcccgtgccttccctgcataccatgtcttccatctgtcccttgcgggcgtgaagaagcttcatgacgccgttggcatgttcgtccggaacttctacgtacatcgtttcatacggttccgtaaggcggtcgttttcatccctcttcatgatcacggtgggacgggaaacgcacagttcataattttcacggcgcatagtctccaccagcacggcgatctgcatggcgccgcgggcggaaacggagaaaacgccggctttgtccgtatcctccacctggatggaaatattcgtccgcatttccctcatcaggcggtcgcgtatcacgcgggaagtcacattcttgccgtcgcgccctccgaaaggcccgttgttgatggaaaattccatggaaatggtaggaggatcaatcgccacgaatggaaggggctccgtatccgcggaaccgcccaaggtttccccgatgttgacgttttcaaaccccgccacccctacgatgttgcctgccacgccgatggccgaatccgtagtgcttaagccggaatattcaaacatgcgggtcacttttccggaaatgcaggagccgtcgctctgatggagccacacggtgtcccctttcttcacagtgccggaggtaatgcggccgatagccacacggcccacataatcgtcccagtcaatattggaaacgagcatcttgaattcaccctccggatcggcatccttcggagcggggatatgttccacaatcttgaataaaagaggagtgcagtccacaggaggttccccctccatggaattcatgaagtaaccgtcgcgggcggaaccgtacacgaaaggggcttcaaattgttcatccgtggcgcccagctccagaaaaagctccagcacctggtcatgcacggcggcgggatcggcatgcggacggtcgatcttgttaatgacgacaatgggcatcagcccttcctgaagggccttgcggagcacaaaacgcgtctgggcctgcggcccttcaaaagcgtccaccaccagaagcacgccatccaccattttcatcacgcgctccacttccccgccgaaatccgcgtgtccgggagtatccacaatgttgatcgtgtatccattccagaggatggatgtattcttggccttgatcgtgatgcctttttcacgttccagatccatggaatccatggcgcgttcctgcacggcctggttggcccggtaggcgcctcccgcctgcaaaagttggtcaaccagggtcgtcttcccatggtcaacgtgagcgatgatggcgagattgcggaacttggaaggatctgacattgcgcgcgagagctaaaaacaccggaaaataaatgtcaagtctgctccatgaataccgactatattttcagagtttgcaagcctccctgccgccatcgccgcaagcgatggaacttttattttcctccggtgaatttatagcttccccccctcctcaaataggagtattctgctccggcataagtaatttctcaattctagataacaatgaagatttggttagatggaaagctggtggaacaggaggaagcaaaaacctcggttttcgaccacggcacactctatggagacggcatttttgaaggtatccggttctataacaagcgcgttttccgcctggaagaccacatggaccgcctgtacaactgcgcccattatctgttgctggatattccttacactcaggaagaactctccaacgtcgtatgcgaaacggtcgcggcctccggcctgaacgacggctatatccgtctggtggttacccgcggcgtcggcaatctggggctcaacccattcaactgcaaacggtcctgcgtcttcatcattgcggataaaatctccctgtacgatccggacgtatatgaaaacgggctggccctgattaccagctccgtgcgccgcaaccgtccggacaccgtttgtccgcaggtcaagtcgctcaattatctcaacaacatcctggccaaaatggaagctgtgcgccagggtgcggcggaagccctgatgctgaacgacctgggtaatgtggccgaatgcacgggcgacaacattttcattgtgaaggacggtaccgtgttcacaccgccagttacggacggctgcctggacggcatcacgcgccgggtagtgctggaaatctgccgggagctgcaaatcccggctcaggaaaagaccatgaaccgctttaccatcacctgtgcggacgaatgcttcctgaccggcactgccgcagaatgcgttcccgtgaccaaattggacggctatcagctgggctcaggaaaaatcggtcctgtcacagctcgaatcctggcccgtttccaggaactggcccagaccacgggaacatcctgttagaaccagccaacccttttttggaccaacgaaaacggctccgccagatgacggagccgtttttttgtgctattccgttaaatataaaaaagaaaacacaggtaagcacattcccgcggggctatacggcagtctcctctggaaatgaaggcttgtgaccttcacggcctcccgttccgaaacgctgcagaagaatccagtatgaaaagccgcgtcgcttgtgaaatgacaaggcaagcgacatcttgcatgtccggccgccacgccggacatgcctcaacctgaaaaaagtctatttcttcttgggcaggccggtttccgggtcaaactgcttagcctgctgggcatgttctttcgtctgatagaaccgaacgtaatcaatcaggaattttacaggatacccttgcccgtctttaggagctttctcgcaccaggtgccgcccacggcggaattgagaatgagatagaacggcgtacggaacggattccccgccccattggcataattggtggtattaaggtcaatggacttcaccagcttgtcatccaccatcaacttgatggaatccttgtcccattccatgacataggtatgaaaatcatcggaaagattctctatcttcacagtccctccgcgggaagcatcccttttggacacgccgtccggactcaagtggaaagtggaataaaccacatccggctgttgggaaatattttccagcatatcaatctccccgttgacgggccagccccatttattcttgccaagcaaccagatggcaggccagatgcccttggttttgggaaccttggcacgcacttccagtctgccgaacatgaaattttttgtcttgatcgtcgtaacggaaccggaggtatagggcatgaacttggtattcttgatccaatccgcggaacttttcttataattgacattggcgaacttttcaaaatgggtttccaaaaccaggcagccatcctccaatctcatattcttgggtcggcctgtataagtctgctgggatccctggttacggattactcccaactccggtttccactttttggcgtctatcctggaaccgttgaactcgtcaccccagacataaacccacccgccggggagggtcctcggaggtttggaatcttctccctttacagacatgcaaaggcatgcagtcaacaacacggcaaataggctcttcatacggagcaatactgcacctagttccgcagcctttcaaacaaaatacatcattcggcgcctcatacctcctttcccctgtcaaatggcgaaatatcctgcaaaatgaatagaacccttaacccggcgcatgctatggtcatgatatgaaaaccactttccctccccatggccgggcgctcctccaccagacgcctgcaggtgctgtcgtgattgtggaaaacggcacagccgtcacccatcttttcttcagccgcatggtacagccggagcatttggaatgggaggaaacacccctgctgcgtcaaacggctgaccagctggatgaatattttcaaggttcccgccgcgtatttgacgtgccgctttctccccagggaaccgaatttgaacgaacggtctggaaagcccttcaagccatcccctatggagaaaccagaagttacggagacattgcccggcgaataggacgcccatcagcatgccgggcagtaggacaggccaacaaccggaaccctgtcggcatcatcatcccctgccaccgagtcatcggagccgagggcaaactgaccggctatgcaagcggcctgaccattaaacaatacctgttggaattggaacagggctccaccactcctttcacattattcatggatatggaacgcatgcccggaaatactccggccagtccataaaacggcaggactggaaaattccggtcagagctgcataccgttttccgtctgaggaagaggcatggatttcaaggcggccttgggggattcaatacccagccattgaagaggcagcaattcacccgttaccctgtaatgtttgtaggttaatccggcaaacacagccagaaaaaatatcaggacggcataaagggccatccataaataatgatttcgggtcgtgcgggcggcttcatccgccaactgctgtaagttccgcatagcgatcgaaggggcggcatcttcttctctcccggatgattcggcagaaaatcccggagatggctcttccgcaaaccggagcctggcatcccccaaagcgatttcatcgccatcgtaaagggtcgcggcgcccatcggcgtcaggccgttgattttagttccattagtagagccaaggtcctccaggacatatcccccttccttaaactgaagcaaggcatgctctccggaaaccgactgaaagggaagcacaatctcgcaatgctcgtcacgtccgatgcgtgcgaaatattcaccgttcttcggaagaactatggttttttcagaaccgtcgggaaggtggatggaaaggcgtggcatgattcctggaaatcatgccacgcccatattcattttcaatccaaaagaccgtttgcccatcacgtataagaaaaatggcgatatccgcctttccccagaaagacagaattccatgcagattcatgatatgggttcatcctcctcaatttttatttttcccgcatactttcgaaaaatattttaagcaattatagtggcctccggggaagttttccataagtaatccactcattttaaaacattacatgaaatactgaatcaatttttttcctgattggaaacagaccttccgaaactgcgacggatcatgccggacacgaacactacgcaaacgacaatcttcaaggggtacaacttgttgggaatcgctaaacaggccattttcaaacataccgttttccgggagggccgccctcccggaacatagggattaaatatgcgcgcaaactgctatcctgcctttggacatgtccttcactatctcgataattttcttatttgcctggagcggtttgaatcaaaagaactcaactgaaattttttctgctgtctggcatctgccgctcctcttctggcatggagtttattcaccctgggttcccttccccgtccgttacatgcagacgtctgcatgacaccaataaaagcggcatgtcgctgccgctgtccctgattattttaataagaggaatttttctcttcatttattactgtgaagacagccagcatggtacaaatcaatccggggcatcgtaaaaacatccggagttcccgtaatgattcgaaatcctctttcacgggaaagtcagcggcctacaccgtggaaaaaccgtgcagccctgcacatgtcttgcgttttgaaggaaaatgtttcatattcagaccatgtttgttgacaacatccgcatattcgccagggcaggaaagggaggaaacgggctggtcagcttccgaagggccaaattcgtgcccaagggaggcccggacggcggtgatggaggcgatggcggaagcgtcattctggaagtggatccgcacacgaatgacctgcgttcttttttttatgatccaaaattaatcgccacggacggggtaggcggacaaagcgccaagaaacatggcaagaacggcaaatccgtcatcgggaaagtgccccccggtaccattatctaccgcagcaatgcatcctccatggcggaggcgacctggctggaacgggaaggcgaaggcattgaactggaaaaaatagcggatctgacggaaatcggcacccggttcacgttgtgccagggcggcctcggcggcaagggaaactggcatttccgttccgcgaccaaccaggcgcctacggaagccgagatgggaacggaaggggaggaaggcgtcttctttatggaattgcgccgcattgcggacgccgggctggtaggctaccccaacgcggggaaaagcacattgctgggagacatttcggaagccaagcccaaagtagccagctatccttttaccacgcttcagcctatcatcggagtggtggaattcgacagctttcgccgctgcgttgtggcggacattcccggcatcattgaaggcgcacacaacaaccggggcctgggacatgaattcctgcgccacatcacgcgctgcaaggtgctcgtcttcgttctggacatggctggcagcgaaggccgcgaccccattgaagaccttcaaaatctccgtacggaaattaaactgtacagcgaagacctggccaaacagccctggttcgtcgtcgccaacaaaatggacctggaagtagcggaagaaaatctggctaacttccgcatgcgtttcccgaaagtggacatcatccccatttccgcgctcaatggagacggtatttcccggctcaggaacaggcttgatgagcttgtaggttataaattcatccgttaacttattcattcaactttctttcaacctttgacatgacagcccctctctccgtaacgacagcttccgaccagcttctgtgccgtatcgccggaattggagacctcttcgccattgaaggggaattcgtcaccgggaaggaaatacccagcgggcacatcaacaccacttacaaagctacctaccgtaaaagcgacgggacggaagattcctatatcctccagcgcattaacgattacgtcttcaaagaccccaaagccgtcatgcgcaacgtggaaaaagtcacgcgccacatcaactggaaagtcctgcgccgcctgaaggattccgccggccaaaccctcaacctctacccggcccggggaggacgcaactacattgacatccccggcgacggcatctggcgctgttacaactacctggccggcacgcacacctacgacgtggtggaaaacacccgccaggcctaccaggcaggatttgcctttgggtccttccaggatttgattagtgacatgaatccggacgacatcgtggaaaccatacctggcttccatcatacccggaaccgcttcaaccgcctgatggaagtggcagagctggatccgcaggggcgtctctccacctgtctgcctgaattggaattcattaaagcccgagagcaggatgtggatcggttgctgaatcttcaggaaagaggcgtgcttcccacccgcatcactcataacgacaccaaaatcaacaatgtcatgctggatgaggacaccgaccatgccgtctgcgtcattgacctggatacggtcatgcccggccttgtattgtatgacttcggagatatggtgcgcaccgtcactccgcctacggaagaagatgaagaagacctggacaaggtgcgcatgcgcatgcccatgttccaatctatcgtagaagggtatctgaccgctgcccacggcttcctgacccaggcggaaatagaccagcttgccttttcaggaaaactcatcacgctggaaatcggcatccgtttcctgacggactatctggaaggcgacccatacttcaaggtctcacggccgaaccacaatctcatccgctgccgtacgcagctaaaactggtggaatgcattgaacaggaacttcctgccatggaacaatacgtcaagcgcgtcgccagggggatgtccagaaaatagggaaaagcttttccttattccattccactacctccggggacggctatgccgtcccttcttttttatattatttgaacatggctgcccattccataatccaagaaacattacacgcaatagccaagccatgtttgaaataccagacatccaactcaatcaatatggcaagccggcaaggatcatgttcctggctccatatgccccagacgctcccgatttctccaaaaaaccctacacaggcaatggaggctaccctcagtaccactacaacatttataaagccatccaagacataggctacgatgtcgtctcctcctccaaaccctattccgtccaattcgccaagggaaacgtggactatgtattctccctgatgaacaggttcgccatgtccaggcctgaaatattcatttcttcctactgcgaattcattcaggttccctacctgggcgccccgcccaacatccgcgccatagcggaagacaaatttctgaccaaaatggtattccgctccctggaattgaacgttccggaaggcattggactttccggagaaaaaggtattccggcccaggcccccttcccaggcccctattttgtcaaaaagcgttttggagccgcttccggcggcatccgggaagacagcatctgcagctcctggaaagccgtgggttcatgcgcccggcgcctgatggaagaagggcacgaagtgctcgtggaacaatactgtgaaggcattgacgtcaccgttcccgtactgggcggggaaaaccccgtcatcctgggatatgtgcagccgaaatccgacaaaccgggcagcatcatcacggaagacctgaaactgcacgaccatctgggttatcaactggtctccgttcaggatatggagcaggacatcgccagtgacatccggaaaatctggagcgctctggggccgatggactatttccgcatcgactatagaatcgacttcgagacgggagaacggcgcattctggaaatgaacatctgctgccacctgggcaaaagcggctccatctgcctggcggccgcagaacacggctactcccaggcggacctcctcaaatacattatcgcctacagcatggacaggcagaaaaacctccgccaatacggcacatggctcatctgacccgtaggaaagaagcggttcgcattccggtcagaacaaaaacggcagttaggaatcaggtatccggctgattgcctcaaacacctcctgccagctttccatggaaacttcctgcccgcccagggccatgccccgctcacgggcggcagcggccatgtcttcccggtagtggggctcccaagccattttagtggcgtacgtgatgaaatccccggggcattcgcacagccatccggtcttcccgtgttccaccatttgttcccaccctccgcgcctgtccacaacaagcacactcccgcttgccatggcctcaaaacccacacgcggccaattctccgtcgtatcggtaggctgcaaaacgatgtggcagcgtcggtaaaactcctgttgggacaaagacttttgatcatggaaagtctccacccaatcgggaggcctgccagtcttcgcctcgctccgccggtcaaaaccgagaaaagttcccctcttccgaaccggagaagcaaaatgctcgtaaatatgccacgtatccttgctgaacttatcttcatcctgccgggaaatgtgtccggctccaaaccagtccgaggaacgccctgcaacaaaaggaaaatctgccgcatcaaaatacggcctaaacgtcatgaaccggatggctggatcaggatttaaagccctcaggcgaggcatgacgtttcccattacgttgctattttgataaagaaacagggaaatatctccacgcttcatggcttccttttccctgccgaaaagccaggtcatgcaattgacgaaaactgtccttctcgtccgttttcgtatcttcgggagagcagccagaaactcttcattacaaaaactgatgacgggagcccctgccggaatggcctcccaatcatagccttcatgcaccgtaacacccaaattcatcatctccggataaagcccggcacagtgtgcctttttctgggtagggataagatgcatttccatccccatctgtctccaaaccttaatctggtgataaagctcggctcccgcaccgccgtaaagggatggaaatccaacaatatagagagaatgtatcatttaattaatggatttatgtagaatagtcttgccgcaagattttcagaacatttggactattgatattcagaaaattattcagatgaaaatagaaaaaatgaataaaacaaatttaaggtaactatatatttaactagccaaaaaatatttgcaatattactctatatagtttcaatgcttttctcctctattaatagtgataaccaagtaacacattctttatagtcatatggattaagtccgctattctcctcgccaagatcaagtagccattctcggatagtttgtaactggataaaagaaaattttctaaagatatccaaatcgtcacgcattctaccgatcatattctgacatgtgcaatctactaagagatctgaatctttcaatttttgaaatttaatcagctcttcaaatgaaatataaataacagcaggcaaataatatctaaaagcctcgttgctgaaaacagaaaaaaaatcccatatatacttacaatcatcagcttgcagagatatccacgatttcccttgaatatatgttatatcttcaaattcattttcatctttaatattatttggaatcgggaatatcggaaaatttatttctaaatattctttttttaataattgcatttttcttctatgaattttttacattttgataaattattccaagcatctttcgcttgttcttgatgagttttattcccacctctaaaacatttattattaatatgactcctagcactagcaagcattaaccatgctttctttttcatttttaatatatagcaacagtcatcgtccgtacactttccacttttaccaacctctttctttgctctattcactttgtcttgtaaatatttttgttctgattcggagcaatcaccaggttttggaatatcgggataaggcacggcaattggctcgactttaggaattacattctcagatatttttttaataactttctctgtcgttcctagcgcaataacttcagtaatggctacggtggttactgcaacagctgcaactatcaatccaactggattcaacaacgccggcaatgcaaatccaaactttccttgtacgtctacaaaagcgctggggaaatttcccacgtaaccatacaaattttcctgaggcctttccatcatcggctcccggggcaatcatccaaagttttagtagttccgaagaaagaactatttaaaatgattttttcaatatctgaatttaattcattaataaataatgaatcacatctaggtatatcattatttttcagattttcaaaatatgatatcattgagcaaaataatgagtatattttaaaggctattgaatcctcacgtggtaataacagtcccccaaaaactactccaaaaatttttgaattgtatccatatgcgacaataggagctccaggaacttcatttccatacgctccaaacaaattaatgataaactccaaattttctattgatacctgccgatcaatcatatttgacaatttatattgtttcattactttagtcaaagcactactgacgatgtcttcagaatcagaaatcataatagaatattgttccatcattttattttcaagaatgcatatataatgaaaatatattttattatcacacaaaaataaaatattatatttttttctttcttcatccaccgtcaaaaacaaaacatcatacttatccggaaagtcagattttaaataaggatattcttcgagccaatactcatgataaaccaaaggaaaaatatttttttcttcacatgaaactggaatatatgtatccaaacttttatttattatttcaatatctgaactgattttttttattttgcgcaaagcactttctacagctacatccaacggggtaatattattgtttcccgcaaataaaatattattcgctgaaacaaaaaataataaaaataaataaaaaatattcataatcactgtcttattccattaataaatgttgcatttgtttttcctgcaggcttattagaattatagagatgggtacggatattaccttccccatctcttacagatgctgtcataataattttaggggggatttttatattttcatctatgttaaaattacttccaaacccttcttttgcaatctttctgtcgttatcacttagtgaagcgtttttgtccggatgactatgagcataccctatcattttgtcgccatcattacatgggggcacacttaagggagaaacttcccaatgtccaccagaagttccaacttctcctacataatatttacaatctttctgacaaatacgaacaccaaattcgacttttacaggtttatttctctttgttcttttctctgtcggggtactgttccatttttgcagatcctgttcataacgtttttccatagcttctactaccattctatttgctaccgcaaatgcttccgattttttttcatataattgaagacctaatatatcacaatatattatagaactattatctgaaaatctgtataaattattactttcttcttctccaatgggatctctactaatccacctgccattttggggattataatagcggtaattgtagtaaaccagccccagttcgtcatcagcgtattcgctggaaaaccggaacggattgtcctctgcggcattcccttccatcctgagaatattcccatacgggccgtattcgtacaaggcgcggcgtcccgctcggatgccgaagagcgccgtggtgtttttcaacaggtcgtgcgtgtagtacaggttttccgcccaggttcccgtctcatcaaagaggctcatagccaggatgcgcgtggctgccggttccagcggatcccacagataggtttttcgcagtacgggcatcgctgattccgtcgcggcggcatccagttccgcgatttgcaggtagccgtgatagatgaaccgtttcttcgacatcaggatatctctttcatagacggattaataaattttgccgactacttcgtgttaagaacctatcgcgaaccctatgagcatgatgacaagccatgtacctgacaatataagtgcaataagatcgtcttttctgttcgaattcacgatgataccacacaatccccaaaacaggcttgcaaattgaccaatgaacattaccgatcctaatgttatagatagagaaacaggaaagcgaatgtttttgtcgaatagtgttacacaagctataggaaacagtgctatccatccgattagtgaaggagtgtaagatttcatggttgattatttttaatacatccacagatagcactctgtatttgactataccgattctttcattcttctgtattaacgcccggacccgccacgtactgtggattaccttttttgttctttcgaatttttctaaagtaatcctctaccccctgtcggaatgcattcgcatgaatttgacctctttgtaatttttttaattgttggtcagaattctgcagatatacaacaccgttcgacgcctttcctaaatcatcaatgacatgactcataatgagaacagaaaattctatggcttcttgattagttagaatataactctttacctgtccaaacgttactgaagggcctaatgaactttctcgtccataccggatggcagttgcaaagtgaatattgacagaactaatatctttcttaaaaaattaagcgttatcaggaagtatgttttcaataatattaccttgcacctaatctgtcgcccatttagttggccaactttgataatcatcatattcttctgccatagccattgaaagagcatacggatcaactttacacaaggaagaatatttggcaatatacttacaattttctttgagctactcaacggcagagtctttgtataaaccaaagacatcaaaccatgtggatggtgagttctcggaaaagtaatatggatttttccttcattgccaaacatattttactgctatatgattttttataattaatttaaaaaatcatataattcattcctgcggaatttacttcccacaaaagatataaatttactatggatttatatagaatattcttgccgcaagattttcagaacattttgactatttatattcagaaaattattcagataaaaatagaaaaaatgaataaaacaaatttaaaataaacaattccattaatcaataaacattttttgcaaaattttcactaaatcttttttgttctgttttaaataacattaatatattcctcaaactaaaacatcaatctccacaaaaagatgaaaccaataaaaaacctattcaatttaattattttctttatcagataacttttatttcaagaaattaattattttttctgagattcatcatctaaataattggcaaattcaatatatgcattttttatgattatttccatcgtttttttatctttgggatcaatagctatcgttctgttcttggtaaatttttcaaaattgtctgcaactaaccttttcagaacgtcttccggattttttcctatgaaatgagccaatatgcttctgctattccagtcatatccatgtttcttcatttcattataaaattgattttcaattactttctttttatttaacaaaatcaaggttttgaaataattacgttcactcttgttaagtatcatttgatttataagaaaacactgaaaaagatatttttgaactattttcggtaaatatttaacatcgaatttccgataaaaattcatagactgctccaatataaagtggttattttgatcacttaatatagaagaagaatacttggaattacctacagcacgcattaagaatgcagaagattgaagtacatatttttttaaatattcttgttcctttattgaaaaattgtttttagcgtagtctgaatcctgataattattcacatcggaatagacactcattgggaataataaaataaaaaacagaaatattttcctcataattttgattgatttaatcatatatctgtttgcattttaatttacaatttctatattcgacaaaaataaaagctaatgcaataataaatagaataccttgaattttattttcttctacagacggtcctccaatagaagagttagattgttgtgcacgctcatatgaaatttaaccatcctccacattgtgcctgtaaacgattttcacagtcatttaaacaatcttgcaattttttagaataattttcaatgcgctttatatatgcgtccatagcagctggttgtacccatgacatatctggacattgtctccccaatatgtcaaatgtattgacggatgatttctgacaaaccaatataaattgttagttttttcttctttggcaggatctctactaatccacctgccattttggggattataatagcggtaattgtagtaaaccagccccagttcgtcatcagcgtattcgctggaaaaccggatcggattgtcctctgcggcattcccttccatcctgagaatattcccatacgggccgtattcgtacaaggcgcggcgtcccgctcggatgccgaagagcgccgtggtgtttttcaacaggtcgtgcgtgtagtacaggttttccgcccaggttcccgtctcatcaaagaggctcatagccaggatgcgcgtggctgccggttccagcggatcccacagataggtttttcgcagtacgggcatcgctgattccgttgtccaaccatattgtaatatggcctcataatactattaattcaagatcttgtaagaatcattggccattcttattgaatatttctgttccaatttagatctgctatattatattaaccattagaaagaatttgatatgcagttttttctggagaaggatatgaaagagactcttagatatcttcttccgaaatgtcgaatcagatatatgccacacgatcatttgatatatgatgaatataataaagaaaattctatatcctcaatcttgagggatagaacgataatataaattattatatctaattattcataattttatttttcaattttatacattcatctttataatcataaaacgaattattttccattagttttaatattcttcccaacaaattcttttcactttcattcaaatttttataattttcaacaacagcatcaattgtatattttacaaatgaatcgatatttccaatttcatatttataataatcaccaaaaaaatatttaatagttaaatttaaacatgtcggaaaataatacctaagaaaagatgttgaaaatatataatgcggcaaaattgttgtatcatattcaagtggcattaaatcatactcccacgaacattttaaccaatttattttatgaacatgaacatattcacaaaattcaattacaggcagcgcaaaagattcagactttataaaatcaatgcatattttgaattgtttattatccggaagagggaagacaggatatatatcctccatggtattaagcaggcattgatatgatataaaattattatccataattaaacatttcacatgaaaatatataaaaaccatctaactctcacaataattgtgagagtttatcttgacaacgttttacctgctaaggcatgtttgactcatcattatgtgtcttatttccaccatcaaaacactcattattcatttttgtactcgcatcaatgaaatcttgaaattttcttatattttgttatatttcatctactacaactaccgttacaacagctacggcctccattcttacagagttgaaaaatagagtaatcagtatttatctcttttatgagcctgttttttcacaacatcgctaaaattacggacatttttcaaaaatattcccttgcggatacaattatgaatccgagtctgataacacgtccaagatttgcttaaacctatcaaattttccatcatggaacattcaacttcaatactttctgctatattagcttgcatcatgggatgaatgaagaataaatccatttccatttctacaaaacaacgggcataatactcctgtttgcatgataaaaacgtctcaattttcaatcgctcaatatcccttcctgcatccggcaaaaagcagaattccttaaaccaataataatctgttctgatttttcttcccaatttaattaattcagacatgacttaacggattttcatctataatacagttttttacattagatggaatttccctgttattgatccaatgattgaggtagctctctagaatttgcaccgcatgatcttcatccttcgcccgaatatgagcatcccagcatagatctctaaacgattcttctgtccacagccaatgagacaccgagcgttttccatgccttggaattatataggattcccgacggaaaattctcggataataaagcacttccttatttctaatagttttatacaaatccaaccttacaatccaatcaggcagggaaggatctgttacaagctggaattccaaagttacaactaattcgtattttgtgataggctccatcatattttaccatttcgcacatttatagttgttagattcatgtttggcagtacatcccttgggagttctagaggaagcatatttttttgcagcatcatgagcaatgtcttgagtttttcctacaccataaccatgaataacttctgggcaacatgttcctttattttcttttgtcggaagtgtactccctcggacatagcatatccacattcctttacgatgttttaattcttttaatatttcttcaaccttgactccacttctcattatggatctttgaagggattctttagatactatggccactcttccagctgcagctattgctcctgcagctagagccaccttggcaggttctgtcaatgcagctgcaccgacagaatttgttggaccagtaccaagcagagatgcgtctattgcctgaaaccccaacgaatcaatgtattgaatcaatctattgttgacaaaagaatataaattccatccatctatttctccaatcggctccctactaatccacctgccattttggggattataatagcggtaattgtagtaaaccagccccagttcgtcatcagcgtattcgctggaaaaccggaacggattgtcctctgcggcattcccttccatcctgagaatattcccatacgggccgtattcgtacaaggcgcggcgtcccgctcggatgccgaagagcgccgtggtgtttttcaacaggtcgtgcgtgtagtacaggttttccgcccaggttcccgtctcatcaaagaggctcatagccaggatgcgcgtggctgccggttccagcggatcccacagataggtttttcgcagtacgggcatcgctgattccgtcgcggcggcatccagttccgcgatttgcaggtagccgtgatagatgaaccgtttcttcgacatcaggatatctccttcatagacggctttctcaatccgtctgttcagatagtcgtagcggcactccacccgcctgttcccctgaatgaaccttaccgcctggttcagggcattataagagacttcccattcccccatggatgtttgaatcttcgtctggttgccgtcggcatcatgggcaggtgcaaaagacgctccttcctcccgggtgatggccgtgtactggttcagattattggccgtgtacgcctccgctgacgcgcccgaaccttcccgagaggtgacgcggttgccgatgttgtcgtacgcataggaatacgttcctccccgactcatcgcgtcggcggccagttcgctgcggccgttgtaactgtagctgtgcgtcaggccgggagcgggagtattgaagtaatccttcttttccgtgggcctccctagcgcgtcgtaggcgtagtcggttttggccggatagttggcgctgccgggacgcagatagtcgattctggtcagcagatcccgtttttcttcccgggtgtaccatctccggagggtattggggtaatcaagcgtttccagcagtccgttgacggcgtggtagccatagacgaagggatcgtcgccgttattgagcgagaccgtagaaagacgtccgcagccgtcatattcccaggccgtctgctggacaataccctctccataatgcagactgtagcccgaagaccgccccaaaccgtcgcgcaaatagttgagcgcgcttgccgccagccctgccgtagtttccgattccgcttcattatattggttgtaagccaacgtccttgttccggaatcatccgcaacctgagtgagcaggttcaggtggttgtagacataattgagcgaaggagtcgcatcgttgtgcatgacggagaccaggttgcccgtctgcggatcataggcataagaagttgccagaggcgttccctgcccgtccaccgtccgggcctgtcgtttaaccgccagcctgttccagtcatcgtaagagtagctttccccatggccgtcggcatagattttagccgtcatcaggccggaggcgtcgtcgtagctccacgccgtcatgtccccgtccgtccgttcctgcggatcggcagcgatggtttcccccggaacgcggaatgtcatgagggataccagcctgtccgcatcatcgtacgcaaagacggagggctggagggccgtaccgtattcggcggttttgcgtccccgcgggtcataagcgtagcaggccgtgttgcccaaagcatccgtgacgcaggagggagaagctgtggacgggtcatactggatggtggtcgtattgccggctgcatccgtcctggctgtttcacggccggcgatgtcaaagacggtaacggcggcattgccgcgggcgtccgtataagtctccgtgctgccgctggccgtataagcgcgggaagaggcggtcagaacacccgcatggtctttccgggatacggtgtacccgtctatgacaacagtttccgcaatgacggaagaagccggggactgcgtttttaccgtccgtctggccggagccgtgtattccgtccattgcagggtttcattgccccgcggatcggtggagatgttttttccggccagcgaggaggacagggaagaaaccagctcggccgtgctttccgcatatgttgttccctggctgttgcagcgcgtgactgtggttacccggtacacgccgtcttcccgttgccggcgagcataggcgtactccgtgacgagggagttggcgggagtggggttctcggccagcttgagcgtggttttgacgatattgccaaacgggtcatagtcataaagcaaaggagccattccatccacctgctgccgcaaaagcctgttgttcagatcaaaaacgcgccggtcatgaacaaggcctccgttggcgttcgcccgggagacacgcaccatgttgccccttccgtccgtgacgttttgttccaccagctccggttctccctccgcccggggaagaagcgtggagcgaaccacgccttccgcggagtattccgtacgatagaggagatgcctctgccccgtgccgctttgttccagcacggttccgtccgcatggcggatagtgacgagcgtcgctcccgtcggcgtggtgacggtttccgtcagtccgtctgcactgtaggcacgcgtactgctccttcctaagacgtccgtttcctgcaccagctgccccagcagatcgtaaaccttgctttccgtcgtcgtcatggggccgacgtcccggcgcgtttgcaggattctgccgaaggcgtcccgcttgtagctgacgatggtttcaggagtgacgaccgtttctccgtccgcgacttccgaccggctgacttccaccagctggcgcgccgtattataggagtaggtggtcatgatgccgtcttcatccttttcccacaaggggccgcagcacatcatctcccgttccgtcactctgccgttgccgcgcgtacgcttaatccaccggttttccctgtcgtattcgtaatccgccgtatccgtcagcgcccaggttccatccgtcagcaaggcgtatttctcaatgcgcgtgttatttccctgagcggaaacgtacgtgactttcctcgtgctgtgccccggcacggcctgccccgctatctgcgtttccctggtctccctgtagagggcgccgtactggctggccgcttcatagccatagaccgtctgcacgccgctggcggactgcttcatcttcagcctcccccgggcatattcgttgggcgccgccggcagccacgtttccgtcacttccagctgttctccctccgcccccaacgccgtggtgcgtttttccacacggcgcacatggttggcttccgtataggtgtaatgcgtatccgccagccgtgcggcgttcatagtgagcaccacgtactggtgcgcaatatccggatcggcatggtcggagcagcggtaataggtgtaggtgcccttccttcccccgcccgcccagggttccatccggacggtttcacgcccgaaggcgtcgtaggaccaggtcttctcgcttccgtcgggagccgtctcccggatcagtttgcccacggcgttataagcgtaagtcgtttcacgggcatagtcggttccataagcctcaatacggctggtgcacaggttgccgctgcggccctgttcataggtttcgcacacccgggaaataggagtgccgttttccccgcgctgcacggtagtgaagagtttccaaatccccgaagaaacctcctgcctttcacggatcgtgaaaatagagtcttccccttccccctgggacatgcaccaggcccctcccgtcccttgccagtagcgggtgacgtaaggcgcgcgcccttccgcctgctccgtgacggtgagcttgccggtttccgtattgccctcaatggtgaaggttttaaaaggcgtccccgtaacggcgtaaagaccggtggagacgtttttggcccccacctgctcgggcagataaaaggcgatcacatagcccgtatccgtcacgttttcaatattggccagaccgtcccacaggttccagacctggcggataacatcatccgcgcttcggacgatgtccaggtaattggcaaaatcctgagccgtccaagaagaacccagcttggtccggtagccggaggccgcacccaaagcggaaacggaagaaccgccgtagatgactgtattgcccctggcgttgctgaccctcatttccgccgcgctggcggaagccgaaacggcacgcccctctgccgcggcatacgccatggaaacggaacccgtccttttccgcgagccgccgatggagcctgcactggccgcgccggcatagcagtaatagttggcgcgggtgcctccgttccggatctggaatgccatgtcagcccccagctcccgaccggaagggggcagaatacagctggccatgggatgcaggtattgcagggctgcgggcgtccacaacctggaagagaagttataagccacgatctccagcatcccgtacggcacgccttccataccgcggaaggaaccgaagctggtgcgccagaccatgctggttttccgcgtctgggcagtcacccgtttgcctgcggaagagaactttccataggcggaggcggaggaaaccaggctacgcacggcagacgcgccgggggaaccgccccggttgtccatgcagtcatccggggaaaagggattgtccggatcaatctcatcctcatctccgccgttgtcgccattcgggcacggattgctggaactgctgttgggagaactgctgcttccactgctggagcctccgcatggatcatcatcgccctcgtcgttgttgtccactggctccgtttccgtctccgggggcacataggaagaagaagaacccgtttgccggttggtaatttccaccttcaggtcaaaggtgaatttggcaatgttgttattggcattgggaatggaaatattgctatagtccacatgtgcccgatgcattccgggctcaatgctgaaagaagccgtctgcggttcgtagctgccgcctccgtactgtccgcgcgggccaatgtccagccgttcttctccatccacggtcaagttagccagatcgtcggcgcccatggtcaccttgcattcggccgtttcatcaggccccagctccctgacttcaaaatcccagtcccagcttctttcaaaagcgtccgttggcgcttgttcgtcgatcgcggagggagctccgctattggaattgctcatgcccgtcagggaattgacatcgttatcaaaggattgttctttcatggtttgaatcggattagctattgaaacgcaaacattgcatcatcccaatcttggaaaaactgcaataatttttatccgttccttatccataacaacaaaacctcctgtttcaacacgtccaacacgggatgcccctggccttagccgtgttcaatatatggtgacatttcttctctgcgcacttccgaatggaaaactctggcccatatggaaaattccggaagcagcatatccaaatggcctttaactgcacgccatgaaacacagcaatttttcatttaacatgaattcatgaaatcttcaacagaaaaagcatgatctccctgaattgaaaaagaaatccaaaatccataaaaacggctatcgccttcggacatgttcagcatccctgacatatccgaacggaaagaaagcaggataaactacccccatccgagcatccattcctgaattttacaaggaaagctgctccttcaaacgctccagcagattgccgcaaccgtcctgcagcaattttaccacatgctcaaagccttcctgtcccccataatagggatccggtacttcttcatccggaaaacgagtcgtgaaaaaacacatgggcactattttgcctgtccattgtccctttttatccaatcgtttcaaatcccgcagattttcacggtccattcccacaatcaggtcaaattgttccaaatcctctttccgcacggggcgcgacttaagtcccggatcctcatatccgtattttttcagtgccgtcagcatccggctatccggagggcagccccgatgataaccgatcattccggcggaatcgctctcaaccaaatgttccaaaccttgttctgcaaccatttttttgaaaatgatttcagcggcaggagagcgacagatgttgcccagacagacaaacaggactcggtaaggttcgggagcattcatggacgtcatttctttttcaggataggcaggcggcagccccatttcaagagggaagagtttatgcatgggaaacggaaacacccacgaatattgcatggggcagagaaaggaactgtgccgctcattcaaaaataagattctcctgtgtttcggcttgcgttagaggatgtccggctgtagattatcgcatggcagatttccctcttggattaagttttgatgacgtgctcctgctgccccgcctgagcgcgattcttcccggcgatgcagacatcagttcccagcttgttcccggctttgacatgaaaatccccgtgttgtccgcggccatggataccgtttccgaatcggaactggcgattgccctggcgcgggaaggcggcctggccgtcatccaccgcaacaaccccattgacatccaggcggccatggtttcccgcgtgaagcgttttgaaaacgcggtcatcccgaaccccgtcacggtcaacaaggacatgacgctggaagaagtccaccagatcatgatggatcaaggttactccggcttccccgtcgtggatgccaaccgcaagctggaaggcatcatcaccggccgcgacatgcgcggcgtggacgattaccaaaatgtccgggtcaaggacgtaatgacccccctttcccgcctgattacggcagctcccatcacgaccattgaggaagcgcgccacatcctttacacccaccgcattgaaaagcttcctttggtggatgaacacggcgtgctggccggccttatcacggaaacggatatccagaagcgcgccatgtttgcagacgcttccaaggatgaacacggccacctgcgctgcggcgccgccgtgggtgtcggccccgattatctggaccgagccaaagccctgatttccgccggagcggacgccctgttcattgacgccgccacaggacacacgacccgcgtgatggacgtggtttccaacctccgcaagctgacggaccgtcccatcgtggccggcaatgtggttacggcggaaggagcggccgatctcatcaaggcgggcgtgcaggccatcaaggtgggcgtgggccccggctccatttgcactacccgcgtcatatccggcgtgggcatgccccaattcacggccattcaggaggtagcctccgtggcgcgtcccgcgggcgtcaccgtcattgcggacggcggcattcgctattccggagacattgtcaaagccctggccgcaggcgccgacctggtaatgctgggcggactgctggcaggtacggaagaaagccccggcaaggtggttcattaccagggccgccacttcaagcagtatcgcggcatgggctccctgggcgccatgcgccgcggctccggcgaccgctacggtcagaacagctccggcaagctcgtcgcggaaggcgtggaagcgcgcgttccgtataaaggcatgctggcggacgtggtattccagctcatgggcggcctgcgctccggcatgggctatctgggcgcgcacaatctggaggaactccggaacaaggcccggttcgttcaaatcacctccggcgggctgaaggaaagccatccccacgatatcaccatcacggaagaacccgtcaattattcctgttaactcctccctcacatggacgacaagcacctcgtagccgtcattgacttcggctcccaatacacccagctcatcgtacgccgcgtgcgcgaactgggctacatggccaagctgtatgcgctggaagacctggaccagattcacgaacccggcgccgtcatcctttccggcggccccaaaagcaccacggacgcggacgccccggacattgactttgaatggctccaaagcctgaatgtccccgtcctgggcgtgtgctacggcatgcagctgctgaacatcaagcacggcggcaccgtaaaagccagcaacaagcgggaatacggccccgccgccctgctgccggaaacctgcgcgggcctgtaccgggacatgtccccttcctcccaggtatggatgagccattcggacacggtggaccatctggcggaaggctgccgcgtaatcgcccgcaatgcggaaggcgtccccgtctccctccaatggggagaaaccaccttcggcatccaatttcatccggaagtgacccattcccatgaagggcgcaccatcctgcgcaacttcctttcctgtgcggccaatcttaaaaagttcaacatcggagactttaaaagggaactcatccgggaaatccgggaacgcgtaggcaacaggcaggtggtctgcggcgtctccggcggcgtggacagcaccgttctggccgttctgttgcatgaggcgggcgtgaacatgcgcgccatctttgtggataacggtctgctccgcaaaaacgaggcagaggaagtgcgggccaatttcgcccgtatgaacgtggaaattgaaacggtggatgcctccgaacgcttcctggcggctctggacggagaaagcgatccggaaaagaaacgccgtatcatcggaggcctgttcatcgacgttttctgggatgccgtgggagacgcggaaatgctcgcccagggcaccctgtacccggacgtgatcgaaagcgcctccaacgccaaatccaaggcctccgtcatcaagacccaccacaatcgcgtggaacgcgtgctggaactccaggcgcaggggaaagtactggaacccctggcggaactgttcaaggacgaggtgcgggaactgggcgcctccatgggcatcccgcatgacattctgtggcgccaccccttccccggccccggcctggccgtgcgctgccccggcgtagtcaccaaagaacgcctggacatcatccgggaatgcgatgccattttcatcggcaatctgaaaaaatacggctggtacgacaaagtctggcaggcctatgccggcctcatccccgtaaaaacggtgggagtgaagggggacgaacgctcctatgaatgggctaccaacctgcgcgccatcgtgtcggaagacgccatgacggcggactgggtggaactccccccggccctgctgagggaaaccagcaaccgcatcctcaatgaagtaaagggcatcaaccgcgtcctttacgacatttccaccaagcccccggcttccattgagtgggagtgagtttttgaaactccgaacccgttgcggcacaacgattttgcggttttatatctctcttttgataacgatttgataacgctccccataggccgtatcattctgtatccccagtggattgcgggtaaagaatgttcttttgcggcttataagtgaggacaaccatattagaaagcccttaccgatggcaacgtcggtaagggcttttgctgtctattcatcagtatcggggctatctttgagtgcatccaccaggaaatcactcaattcctgtgagggaacttttgcccaccgcagggtggtgtcgtacttggggtagttgtaccgccagcggtcatagtcctccctggtgatctccccggcctccagcttcttggcctgctccgcccaggcggacagcatatcaagcatattggcataggtcttgcctttggatttgtccagacgcagacaaacctcgccgtcaatctccccaatagtcagcccccgaatatcctccaaagcaaagagggtgtgcatcaggccgatgtcggtatctatgtcagggacggtcagggcatcaggggaaatatcaaagaagtcagccagggtctttgtcaggtcggccttgggggtgcggctcccggtttcatactgtgccatacgcacatcggcggagcgttccgggaaacccaccaccatgccaagatacttctgtgtgatgcccttcatgttgcggaagaaacgaatacgttcaccaatcgccataactgccaactccaatctatgtaatggggacacttgaagtataacagatatgtttagaccagtcaagagaaaaataaataaatttgtttatattttctcgttggaaggtcttgacataacggaatagagttagtataataggactacgttaagcaaatagcgttaaatcaaaagaaaggaggaatccatatggagaacagattcatccgggcggaagaagttgcggacgagctgggtgtatcgaagccctacgcctataaactcatccggcagctcaacgaagaattgaaggacaagggcttcatcaccatcgcagggcgggtcaaccgccagtatttcaacgaacggctctacggggccagaaaggaagggaactaaatgccagtctttaaggacgaagcaagaggaacatggtacgtcatggtgcggtatcaggactggacgggggagcgcaaacagaagtgcaagcgtggctttgccaccaaacgggaggcccaggagtgggagcgcagtttccagatgcagacctccggcgacctggatatgacctttgaagcctttaccgagctttacaccaaggatatgaaaccccggctcaaggagaacacctggctgaccaaggagaacatcatccagaagaaaaaattctgccctactttggcaagcggaagattagcgagatcaccaccaaggacgtgatcgcatggcagaacgagttgctggcctaccgggacgagaagcgcaagccctactcggctacctacctcaaaaccctgcacaaccagcttagcgccatcttcaatcacgctgtccgcttctatgagctgcgctccaatcccgccgccaaggctgggaacatggggtcagaggaacggaaggaaatgctgttctggacgaaagcggagtaccagaagtttgcagatgccatgatggacaagcccgtttcctactacgcctttgaaatgctctactggtgtggtattcgggagggggaactgctggccctgaccccggcagactttgactttgaggccgggacggtgaaaatcagcaagtcctatcagcggctccacggcaaggacgtcattaccacgccaaagacgaagaaaagcaaccgcaccattaaaatgcccaacttcctctgtgacgagatgaaggattacctggggatgctctacggtatcaagaagaaggagcgcattttcaccatcacgaaaagctatctccaccatgagatggacagaggggcgaagtcggcaggggtcaagcgtatcagaatccacgacctccggcattcgcacatctcacttctgattgacatgggcttctccgctgtggcgattgctgaccgtgtggggcatgagagtatcgagatcacctatcgctatgcccacctgtttccgtccaagcagacggaaatggcagacaaattggactttgaaaggatgggagcgtaatgtcagctaagaatttggacactcacaaccgctggaggaacaagaccgtggccttccgggtatccccggaggaaaacaagcagattgacgccgctgtgcggctctctggcctgacgaagcaggactacatcacccggcggctcttagaccgggccgtggtggtgcagggcaatcccagggtctacaaggccctgcgtgaccaactcgccgccgtcctgggggaactgcggcgcattgaggccgggggcgacgtgggggatgaacttctcgccaccattgaccttatctcagtgacgctgggcggcatgaaggaggattgatagattgatggattccagagaaacgaaaaggactgtcccggttccgtctgttggcgcagacggggaacagcccaattctcaaacaactacccaaagtatagcagaggaaacggctgaaaacaacccccaagagaaagatttagaggaaatgctccgggatatgcggcgcatgaacgacccagcctacctccacacagtttccatgaacgacctttaccagaacatctaccagagcagaccgcccgtaatagacggtctgctctaccctgggacgtacctctttgcgggagcgcccaaggtgggcaagtcgttcctgatggcccagcttgcctaccatgtcagcatgggcctccccctgtggggctaccctgtccacaaggggactgtcctctatctggcgttggaggacgaccaccgccgcttgcaggggcggctataccgaatgttcggcacagagggcaccgacaatctgctctttgcggtctacgccaaacagcttggcgttggcctggaggaacagctaaagaagttcgtccgggaacacccgaacaccaagctgattatcattgacaccctccagaaaatccgggaggctggtggggataagtacagctacgccaacgattacgaggtggtgggtaagctgaaacgccttgccgatgattgcggcgtctgcctcctgctggtacaccacactcgaaagcaacaggcagatgacaaattcgatatgatctccggcaccaacggtctgctgggagcggcggacggggcctttcttcttcaaaaggagaagcggacagacggcagcgccgttctggacgtggccgggcgtgaccagcaagaccagcgattctatcttaccagggacaaggaacggctgatatggacgctggagcgtacggaaacggaggcatggacagagccgcccgacccggtgctggaggccatagccgcccttgtgacggcggagaagccgacctggggtggtacggccaccgagctggtagcggcgctccagaccgacatgaagcccaacgccctggcgatgcggctaaacgtccgggccgggaagctgctgatagactaccacatccgctatgagaacagcaggagccacgccgggagaagtatcagcctgacgctggaaccgtcccaggcgtgacgaccgtgacggctgtgacggcttttttgagagtggcggcggtgtctgaaacatcgtcacggtcgtcacggctgtcacggggagcagcaaagtttaggcggggtgcagggtgcccttttcaaagggcggccctgctgggggaggcaaccgcagttgccgggggcaaagcccccacaccccctcggagagcccacgacactttgcagaccgaagggatgaaagtgtcatagtgggttattacacttcctgcaggaagtgcctcccccgaacccccgtcctctttcaacaacccaacatctgaaacaggaggatttttgcctatggcgagaggcgacggtattgaccgtaccaacgcaagaaatatgaggctgaccgaaaccaagatcggtaacacccagcagcacaacgagcgtgagaaggattcctatgtcaatcaggacattgtactggagcggacgccgctcaatgtccatttcaaaaccccgtctgccgggtatcgggagatgtttgctcaaatggaggccgacggcgtgatctccacccgtggcatcaaggaggatgcctttcgatacggtgagttggtctttgatgtaaactccgcttacttctacaatcacggcgggtatgacttcgcaaaacaattttacaccgaagcctataaagccgcaatcaaaatcgtgggcggagagcagtatattttgtcggcggtcatgcacgctgacgagcgcaaccgggccatgtccgaggcgctgggggaggacgtgtaccactaccacctccatgtggtttatatcccggtagtggagaaggagatacgctggacaaagcggtgcaaggacaagtccctggtgggcaaggtcaaggaaacgatcatgcaggtgagcatgagcaagaagtgggcgtccaagcccattctggacgaaactaccggggagccgttacgcacagctaagggcaaacccgttctacgaaagtcgtacagtgtcctgcaagatgatttctttgagcatatgcgctccgctggctatgacgatgtagagcgtggggaacgtggtagttccgaagaacatttgactgttacgcagttcaagacggagcgtgagcaggaacggcttgcacagcttcaagaggtgtcggcgctggcccaggttgaggccgacaaaaagaataaggaggcagcatcagctgagaagaaagcggcccaggccagggctaagctggacgatgtagcgcccttgctcaagggcatggagaaactggcggcggacttctccgacgacccggagcggacgctgccggaggcggggccgctggaatcggccaagtcctaccgggagaaaaaggccaagcccctttgggagaagatcgtcaaggtgctgcgctccgtctaccgggcctacttcgacctcaagagcaagtttgagcggttgcagagcgcctatgatcgtgaggtcagtaagaacggctccctgtcagccaggatttatgaggtttgtgccgagagggacggcttgaaagggcaagtcagggactatgagcgggtcagacgggccattggcccggaacaggcggacaggatactggaggcagcttaccagcaggaacaggtcgaaaaggagcagaaatggggtgcaaggtcaaaaataagggtaggcgcacgataatcacaaaaaatggaggtaatttcatggaaaagtacatctttgacgagggcaacggtctgtggtatgagttgcagagggactaacaatattcgggcgtgtgcggcggaaatcgtggacacagaaattatttgcgcatgaggccccaaatcggagggtgtcccggtgaatgccctcctgatttatttgggacagcgggtaaaaacttcttgcattttagagtgtgctatgctatactgctgtcatcctgatttgaggagtctattcaacatgcggcaaggtattcttaaataaaatttgataatgggcacaaaaataattgccccttgcaggggcttggtttttgtacccaatttaagaatgcttttgcctttttatcaaatatcgtgacggataacggctcatgttagctgaatgcgtttctatgtatccgaagtcatgatccccagcggtaaaagtatttgctgctggggatttttatgccctttggggctgtaaagggaggacaatcacatgaaaataatcaatattggaattcttgcccatgtagacgctggaaagacgaccttgacggagagcctgctatatgccagcggagccatttcagaaccggggagcgtcgaaaaagggacaacgaggacggacaccatgtttttggagcggcagcgtgggattaccattcaagcggcagtcacttccttccagtggcacagatgtaaagttaacattgtggatacgcccggccacatggattttttggcggaggtgtaccgctctttggctgttttagatggggccatcttggtgatctccgctaaagatggcgtgcaggcccagacccgtattctgttccatgccctgcggaaaatgaacattcccaccgttatctttatcaacaagatcgaccaggctggcgttgatttgcagagcgtggttcagtctgttcgggataagctctccgccgatattatcatcaagcagacggtgtcgctgtccccggaaatagtcctggaggaaaataccgacatagaagcatgggatgcggtcatcgaaaataacgatgaattattggaaaagtatatcgcaggagaaccaatcagccgggaaaaacttgcgcgggaggaacagcagcgggttcaagacgcctccctgttcccagtctatcatggcagcgccaaaaatggccttggcattcaaccgttgatggatgcggtgacagggctgttccaaccgattggggaacaggggggcgccgccctatgcggcagcgttttcaaggttgagtacaccgattgcggccagcggcgtgtctatctacggttatacagcggaacgctgcgcctgcgggatacggtggccctggccgggagagaaaagctgaaaatcacagagatgcgtattccatccaaaggggaaattgttcggacagacaccgcttatcagggtgaaattgttatccttcccagcgacagcgtgaggttaaacgatgtattaggggaccaaacccggctccctcgtaaaaggtggcgcgaggaccccctccccatgctgcggacgacgattgcgccgaaaacggcagcgcaaagagaacggctgctggacgctcttacgcaacttgcggatactgacccgcttttgcgttgcgaagtggattccatcacccatgagatcattctttcttttttgggccgggtgcagttggaggttgtttccgctttgctgtcggaaaaatacaagcttgaaacagtggtaaaggaaccctccgtcatttatatggagcggccgctcaaagcagccagccacaccatccatatcgaggtgccgcccaacccgttttgggcatccataggactgtctgttacaccactctcgcttggctccggtgtacaatacgagagccgggtttcgctgggatacttgaaccagagttttcaaaacgctgtcagggatggtatccgttacgggctggagcagggcttgttcggctggaacgtaacggactgtaagatttgctttgaatacgggctttattacagtccggtcagcacgccggcggacttccgctcattggccccgattgtattggaacaggcattgaaggaatcggggacgcagctgctggaaccttatctctccttcatcctctatgcgccccaggaatacctttccagggcttatcatgatgcaccgaaatactgtgccaccatcgaaacggcccaggtaaaaaaggatgaagttgtctttactggcgagattcccgcccgctgtatacaggcataccgtactgatttggccttttacaccaacgggcggagtgtgtgcctgacggaactgaaagggtatcaggccactgtcggcgagccaatcatccagccccgtcgtccaaacagccgtttggataaggtgcgccatatgttcagtaagattccttgatacgccacagcaaggatggttattgcatttccctgcctttcgtggtaaaatgtagttgtaaaccaccagagaaaacaacaaccctgctaccccccgttatcaccaccgataacaatttgataacagcccatcgtatagggctggataatatggacacatcaaataatcaaaaaaatgaggtatcaaatttatgaagcaaaatccgttaaatatgatgcccaacaacgagtgggagtaaagcttccgcaccctgttgacggccgttcagcagggtgcctccgctcctcctctccggtaacaaaaatcaagaaaggagaaaataatgactgaactggaaaaatgcatggcgggcgaatggtacgactgccatgacaaggtgtttctggaattcaaaaacaagacgcaccggctcctgatgaaatacaattccctcccttacgaccataaggaggaaaagcgccaggtgctcaaggaaatgctgggcagcgtcggcaccaaggtctccatcggccattccttcatctgcgattacggccgcaacatccatatcgggaacaacgtcaccgtcaatacgggctgcacgttcgtggactgcaacaggatcaccatcggcaacaatgtgctgatcgcccccaacgtacagatttacaccgctacacaccccattgagctgaatgaacgcctcactcccgtggaaacggatgaaggaattgaatacatccgccatacctacgctcttcccgtaacgatagaagacggttgctggattggcggcggcgtcattatcctgcccggcattaccatcggaaaaggaagcgtcatcggagccggcagcgtggtcaccaaaaatattcctcccgacagcctggcggcggggaacccctgcaaggttattcgtaaaatcaacggaagtcgggaacaatgatcaagctgatcgcttttgatctggacggaaccattggggacacggtccccatgtgcatcagggcatttgaaaaagcagtttctccctatgccggacacacgctgagcgaacgggaaatcacgcagactttcggcctgaatgaagtaggaatgatcaagaaagttgctggagaaaaatggcgggaagctctccatgatttctacccggtttatgaagaaatgcatcaatcatgcccgtctccatatgaaggtatacgtgaattgataaaaaccttgcaaaaggctggcgtgcttgtcgccctgattaccgggaagggatacaaaagctgccgcatcacgcttgagcaattcggcatgcggaatttgttctgttccatcaagaccggaacggaagacaaaccaaacaaggcggaagccattgaagaacttctgcatgacttccgcttgaacaaagatgaattttactatatcggggatgcggtttcggatgtgaccgcctgcaacaaagcgggagtgacctgcctgtccgccgcctgggcaacgaccgcggatgtcagcggattgaaaaaagccaacccctcaaaggtttttcccagcataaaggaattgacattattcctgtccattgagaaataattagaagatactcctcacttggataaggaaaacataatggaaaaatttcaaaaactggcccttctaattgatgctgaaaatattgctctggataagcttgaaagcgtcattcagaaaacatctgcatatggccgtatcgtgattcaaagagcctacggcgactggagcaaggaaagtttaaaaaactggaaagactcgctaaaccggtttgggataaaagcgcagcagcaatttaattatactcccaaaaaaaactcaacggatatggcgttgactattgacgccttggatttattgtatcaatcatcttacgatgcccttgccattgtttcgagcgactgcgatttcactcccgtttccatatatgtcagggaacatggtatttatgtaatcggtatcggagagaagaaaactccagaggctttcaaaaaaagctgcaataaatttattttattaaaaactgctgactctaaaacagataataaactacaaaataaaccttctcaatctggatcagaaaaacggaaaaaaatccctgagtctgttcatagattacttaaggaggcatttgaaatacacaacaaagaaggatgggtagctttatctcgggcagcatcttacgttaaagaaaaacagcccgatttttctttaaaagaatattattctcaattttataaactcattcaggattttcaggaaaaatacacacttgataaatcacacacaaaatacctatgcaaataaaattgtagaattaccttctataagcctattaacctgatcctatcctgggacaggaaataaattcctgttttttatacactcatttaacgcaaaaaagcctctgctgccatggataccggcgccgtcatcctcacctcctttctctccaccattcccgtttatcttttctttgccacgggtttctatctgcgccacaagcaagtcatccaggcagaccacgacgcgcccatcatgcgcatcgcgatggatgtggcctatccctgcctcgtcttccacagtatcatgaagtacatggtgctctccggaaatgagacgctcagcagcgtttccttttccctccaggccatttcagccggggccctggaacttctgctgggcatcgcagctgcatggctggtcgctaaactgctgcgcatgcgcatcggcacgggcctgcgtacgttcaccctgacggcgggagtgcagaactacgcttttttcgtcattcccatcatccagatgctgtttaccgccggcaacgaccccacgctgggcgtccttttcgtccacaatgtagggtgtgaactggtcgtctggagcatcggcgttatcattatcgcaggcggtccgggcaacctgaacatgggcgtctttttccgcgggcccctgctggccgtcatcgtgggtctggcgctcgcctggtccggcctgggaacctatgtggcccaaccgcccctgatgaagacttttgaaatgatcggcaactgcgccacgcccctgtgcctgatcctgttcggatgttccatgcgggatttatggcataacatgaagtgggaacccaaacccatcatctgcggcctgctgacgcggctggggctggcccctgcactgctgctcctgatggcttatttccttccggtggatgattatatcaagcgcgtcatcatcatccaggcagccattccctccgccgtcattccggtcattctggccaaacgtttcggaggccatccggacctgggcactcaaatcctgctgacaacgacggtggcttctttcctcacactgccctgctggctggctcttggttccaccctggtcgtaccattgtattaacgggataatggcgacatcaatccccggatgacctggaacggcccgcttgcccaacatcttccgcttttccggaggattccattcccggtgtcctgccccttgatgggaaataaaaccagtctgcaaggttcggcggcggaacaatttccctgctgaaatatccgcatcctttccgtctccatactgcattccatgctgaatgcttccctacctttgggttgactccccagtcggatatgtattgaatggattcatgaaatttcctgctcctctctgcgccgccctgctgccggtcctgttttcctgcgcggagcaggtttcccggattgaacacgttcgggaggtgcccttaaaaaccacggtggttcctgcggaagacgtaggcatgcaccgcacccaggccacctatctgctgcatggcgccgtctcccagcaacagcgccttcagcgtctgggtcaatactacttcgtcacatggaacgatgccaatccggaacaggcggcaaccctggtcatgatgtaccgccagggaaagacaggttcaaccgtcctgacaaaatccatttcctatccggccgggagaaaaggcggcacgcaaaactccgttttcggattcatcggggatgaggccagagaaaaaggggaagtcctcgcatggaagctcgtcctgaaggacaaccgcggcaaaacgatttccgaacgctattcttatctgtggggggacgatcattgactcttcggcaaaaacaccgaagagccataaaatcagccggatatgcaggataagacctgcagtctccggcagtctcgccagcctccaactccgttaataatcctccggaatatgggcacgcttacgcttcctgccgtttggcacggcgtttgcggacagcgtcggcaagggtttccagcacttccacagtcgtctcccacccaatgcactggtccgtgatgctcttgccgtacaccaggtcggaactcaacggctgggccccttccacaatgttgctttcaatcatcacggcaacaacctgttcggacccgctggatatctgttccgcgatattggcggccacagccggctgtttgcgataatccttgcaactgtttccgtgggagcagtctatcatgatgcggttgttgatgccggccttctgcaaggcttcttccgcttcttttacatgatcttcatcaaagttcggccccagggaggaaccgcgcaggatcaggtggcaggatttattgcccgtagtggaaacaatggcagaaactccctgcttggtcacggaaaggaagcagtgagggcaggaggaggaaacaatggcgtctacagcgatttgcaggctgccgctggtgccattcttgaatcccacaggcatggaaagcccggaagccagttcacggtgtacctggctttccgtggtgcgcgcgccgatggcgccccacgtgatcaggtccgcaatgtactgcggcgtgatggtgtccaggaactcggtagctgcgggcactcccatatcccccaggcgcagcagcagcccgcgggccatatggagaccgcggttgatgtcaaaggtatggttcatgaacgggtcgttgatgaggcccttccagcccacggtggtgcggggcttttcaaaatacacgcgcatgatgatcaccagatccttttcaaagcgcgccatttgttctttcaggcgggaggcatagtccacggcagcctggggatcatggatggagcatggccccaccaccaccagcaggcggtcgtcgtggccggaaatgatgttctccgcattcttgcgggtcgtagccaccattttggcgatttcggtggttgccggataatccttgattaaaatggcgggagaaatcaggggctcaatgtcttgaatgcgtatgtcgtctgttttgaaccagttcatgtctggggcttattgagaggtttttgagagaagttgaaaagaaaaaaatacggtttgcgggctttatgcctgaatataccgcggggcctcacggccataagccggaagccccgcaaaatgaagcggccgcgcctcccgacaagaggcgccgtcatgcattaccaggaagtcacattgtcttccgtcaattccggattgttgatatggccgtccgccgtgctgccctgcttgtccttgccggtgctgtaaacggccacgttcttggtcaccatccgggaacctacctgaacacggggagtacggtcgtcagggttggcattcaaaatgatgtaatagggagattcccaaggatccatcaggcccacacggccgcggctttcaaaaaacaggccgggagcgccttccacatccgtagtcgtcgtattgaaataagccgttttcttgggattcagctttctgtcctcatccgcccggtccatataattggtcaggatgctcatgatgcggctatcgtcgtccacggcggttgtcacgtaatactgtccgtccttgtgggcctgcttggtcatttcccggctgctccaggccacgggaacgcggccgttgtccagcatgtaattttccacagccgtctgcagaccgttgcagtcgcttcgcgccgtggtaaccttggatttttccatcacgccgttcaccaccgtcatggcgatgccggccagcgtcaggataatggcaatcaccacaagcaattcaatcaacgtgaatcccttggacttacggttcaaaaaaggtgtcttcatactttgccaagagtagcgcaattacagttcagggcaagcggaaaacaaccggcgccgcctatttcaaaacctgttcccggaatggcagcagacggaataaccccggcgcacaaacaccccggcgccttccggcagccggggtgtttaaaaagaatgctcctttagttggaggggacaggggtttctgcggaagcaggggccgaagcctgagaagaagcggcttccgcctcagcggcgcgcctgcgcagctcctcttgctggagttcttccggcgtcttggcgggaacggaagcttcctgcctggcggcagccttcatcatttccgggctcaacaggctttccgaactcttaacgtgctgccggttgatcagcatgcccagccccaggcaaagaaccatgaacgcggttccgaagtacaccgtggcttttttcagcacatccgtcgtccgggcgccaaaggcctggtccgtaatggctgcgccaaaggcggctcccagcccttcctgcttgggcctctgcataagcactacgcccagaaggagaagtgatacaatcaccaaaacggcaaaaagcaactgaatgctgatattgagtgaatctgctaaaaaaaggttcatgagcgcggggagtatgtgtgaattcgaacggtttgtaaagtctaggaaatgatttcgttatgctcgttgcagacgattttcttggggatgatgggcttgtccgacaaggcaaaactcataatgaccacccgttcgcccgtcttgattaaatgggccgcaccgccgttcatgatgatgttccccgtgccggcaggcccctggagagcatatgtttccagacggttcccggacgtgacggacgccacgagaactttttccccgggccacaaatccacggcggccatcaaatcggcaggaatttcaatactgccttcatattgaacatcgccacgggtaatcatggcgcgatgaatttttgattttaactgctcaaccaacatgacgttcgaacaacaaacccccgatcgcccctccggtcaagccgtcatcctccattttacggttttctgtgtcttactccccctcctccagcgcttccgcggcatgggcggcatcccgggcaagctggcttttcaattcttccaaagaggggaatttgatttccggccttagaaaacggaccggttccacttccatctcccgcccgtaaatatcccccgggtggccgaataaatgcgtttccagcaaaagttcccccgtctcaccttccacggtggggcgcacccccagattggctacgcctccgtattttttgccggccacccgggcgcgcacggcgtaaacgccatggggaggctgtaacccgcaaccgggtcttatattggccgtggggtagtccagcaggcgccccagttggcgcccgtgaatcaccgggcccttccagcggtagggacggccaagcatgccggcaacctgtaaaaaatccgcctcgcgcacggcttcgcgaatccgggtgctgcttatgcgctccccgtcctgcagaatagaaggaacggccgtcacccggaacccgtagcggcaggacagcaggcgcagggtttctacattcccttccctgccgcggccaaaatgccagtcctctcccacggcaatctgagccacccggcaggaggaacaaagttccccaataaactcttccgggctcatggacgccagcctggaagaaaattccagcgacagcaccgccttcacccccagctcttccatcaaggcaaatttttcagcatcttcccccatgatggcgggcggcacgctttccggcctcacccgggccagcggatgggtgcggaatgtcagcacggcgggaattcctccgtcaagagcagcccctttcaccgccgcggcaatcactccggcatgtcccagatgcaccccgtcaaacatccccatggcccagtgtacgggggcggcaaggcttttcaattccttgaattcccggtaaatgaccatatgctacccggcaatcagaatatccgccagctccttcagggaaagcatggcccggaacagttcctccctgggcgcggttttcagggtgtccaccgtaatggcgcggtccagcgtaaaagaaccggacctggtgcgccggagggcgctcaaatgcgctccgcagcccaatgccttcccaatatcataagcataggaccgcacataaaaacctttggaacattgaacggtaaaatccacttccggaatggccacgcgtgaaattccgtggccaaacacttccacaggccgcggctcccgcacaatttcctgacctttccgggccagtttgtacagcggcaccccgtcctttttgatggcggaaaccatcggaggaatttgttcaaaagctccgtcaaaccggtcaaacgcttcacgcacggcctgttccgtcactccgtctacggaatactccgccactatttctcccatggcatcctgagaggaagtctccacgcccagcataagggttccgacgtattccttgtgttcgcacatcaacttgtcctgaagcttggtcgccttccctaccaccagcatcagcaatcccgtagccatgggatccagcgtgccgcagtggcctattttcttaattcccagggaacggcgcgcaattgccaccacatcgtgggaagtcatgtcccgcgccttgtcaatcaacaggacgcccgaaggaacctggatggaatctgaaacattcatgaaatcttctgtcggagcacgcgttccacttcttcccgcatggccttcaggatagtaaggcgcacttcttcaataggcccccggatacgcactccggcggccatggaatgaccgcctccgccgaaacgggaggccagctccgcgacggatatttcaggcgtcttggatctcagggaaatacggatgcggggatcgtcctccgtttcttccagataagcggccagccagactccctgcacggaacgcagaaggtcaatcaggccttccgtatcttccggacggcttccaatccgggcttttgcctcattcgtcaggcaaaacgtgcaaatcctgccgtccggcgtcagcttcattccgttcagcgcttcacgcatcaactgcattttcacccacggcttttcctggtaaagctggcggttgatgtcctggacgtcaacgcccatccggatcaaatccgcagccagttccatgacggccgccgtcgtcatctggtactggaaagaccccgtatccgtgctgacggccacgtaaagggcgtctcgcatcaccggagtgacgggaatgcccagatacttgaaaaagtaatataaaaccgcccccgtagcgcattcgtccggcaaaacgcactgaacgtctccaaacagctcgttcgtccgatggtggtcgatgttcgcccacaccttcactcccgccaaagcctccaagctgcgttctcccagcctcttgagcgcgccgttatccacggaaatggctacttccacatccaccgtctcatcaggcgtgggaataatattttccacacccggcataaaggccagattggaaggcaccccgtcctcgttcatcatcaccaccttctttcccatttgcttcagggcttcccccaaagccagcgtggagccgatagcgtcgccgtccgggtgaacatgcgcaattaccgcaaaactgccgtggctgcggatcagattcgccaaaggcgcgaattggggacaatgtttccaatcttccatatgcactgccgtgtttttatagaaaaagccgcacctggacaatcaccaagtgcggcttgaaaagtcgtacttaatcccggaagaggattacttcttggacttcatgaccaccggagccacatccacggcgggctggttcaggtcattgaacttgggcaggggggtcaggggcggagcaccctgatcctggcagcagcaggaagccatgatgctcgccgcaaaagcggcaagagccataacggtaatcttcttcatatgcgtggttaaatgatgggtgataaaggatatggaaatatcttggagcataaaagcataccatgcgggcgcccgtcaatcaaatttgcgaaaatctcccaaggagacgcctttcccaaaatggcaagacgcataaatcgctcgcccggggttatctgtaattataatctctgccaagctgtatccttttcatgcccttttccgtcaaaatactccggtttttcggcattctcctgctgagcctctgcgcgctcggcgtggccggcatgacctgggcgtacctggtagaacccaatcttctgtttgtcaggaaagtggactaccgtgtcccccagtggaaagggaagggaacacccgttaaagtcgttattgccggcgatttgcacctgatgcccaccgcgtttgatgaagtgagggccctgcgctatgttcagaggatcatgcggctccggccggacctgattctgctggttggggactatgcccgtggaagcagcgaaaacgccagcatggatcccgccacggccgcccggctgctgaaaggcctgacggctccctgcggggtcttcgctatccagggaaaccatgatttcaccttcggctggaacaactggagcagggaactgaaacaggcgggaatcaccgtactggaagaccagagctctcttgtcacgttcaaggacggaaggcagctccagctttccggaatattggatacgacgcgcaatgtcagaaaacggctgcccaaacgccaagcgccggacatcccccatttcctgctttcccaccgtccggaaacggaccacatactttcccatggagacgtggacatcgtcatcagcgggcacacccacgggggccaggtttgccttcctttcggccttctgcggtttgaagccagcccggaccatgccctaccctacacctatccctggcatatctccggcggcaatacctacctgatcaccaaggggctggggacaagcacactccccctccgcttcaactgcccgccggaaatctatctgctggaactgcattgacccattcctcccgttaaaaatgcagtcccttccttcccggttccctccccctccactccacgccggcggcaatccataaggaaaacggaaaagaacggccgggttccatagtttcaaaggagccggttatcaaacccttccttcagccttaaaatctttctggccgtcatccggtaaacaggccggtaaaggtgctttttcaagacggccgggagcgttcttccgggcagcggaccgcgcagcagcccggcttcacgcataacccgttcgtaacgttccccttcataacgccaattataccgccagggcttgtgcactccctggtaatgaagaatgcccggttccaaagccgcttccaccgcctggcgcggcgtgacgccgcgccagaactgttcccggggatcgtttttcaaaatgcggcgcgtcaagccgtcatgccagttccagcgcgggtgcaacggcacagtcagctcgcacagggctccgttcaaggcatcctggtccggacacgtcagcctgtcccggtgagtgacggcataatccagcacagccctgaccagattcctctcccggaagacatccacattcatcagcagcacgccggaattgaaatatcccgtgcaggtcagcggcatctcaagacgttcgttaaaatgggaaccgggtctggaaaaattctcaaacaccacccctactgcttttccgtccatattcgtccggaacagttccgtcaaatcccggcaaaccagaacgtcaatgtccagatacagaatattgccccgctcttccttcaataattccggaatgaacacgcgtccccaggctggcaccggccattgttccgtatgggggaagtcgtgctcttccagaatgccggaaacgtctatgaactccagacggcaatcgaacggagcggccagccgctccacgctcgcccggttctctccgtcaatgccgtcggaaagaacgtaaattttgtaaaaagtctccggaccggcagtattcagcaaagaaaagacagtaacgctcaaaggcagaatgcccctgttgtcactggccaggacgacggcaaattcattctttttcatcggattatccattcgggtgatgtcagcggcgcagcaaccgggctcccgccttgcgcattttcttccagtaataggaaaagtccaagccggattttccgcccatccaggctttcagcaattttccttcccggcgggacaggcaggcatcatcctctgcgggacggtacagattttcctcacggagcatatcggccacctttcgggtaacctccttttggacggcatgaggggcatatttgcggatgttcctcacgcccattaccagcattttcaaaaatgccgtcctgtattcctcaagaatcccggcttctttccattccttcagcaccagctccgccaccgtcaggtaatccagcgactggagggaactgccggacgcaaaaccgctggtaatggatccggcccgcttgcggtaaacgtaagccgccctgctgacgacgcaaaccctcctgcaccatggaaaaacggcgtaatggaaatacaggtcttcacaggcaacgccctcggggaaccggatgccatgcttttccacaatggaacgcctgatcatcatgccgcccgctccatgatgtattttcccaatggtctccggagtgcagggaagccaccctttttccggaggggccatgtcctccggcagaaaccggtcctcccggtccggggcggactcgtaataataccggaacccgcatgccagcctgtcggcatccagcgccttcgcacggcggtacatctcctccagcaaatccgtttccagccagtcgtcggaatccaccagaaacagatattctcccacagcatggctcatcgccagattccgggagcgggataggccgccgttttccggagcctgcacgaccttcacccgcgggtcccgctccgcgaattcccgcagaatggacagggaaccgtccgtggaagcgtcatccacgcaaactatttccagctcacggagcgtctgtgagcaaatgctttccaggcactgggccaggtacggctccacattgtaaaccggaaccagcacggaaatgttcacgggagccgtcatgagccatgcggagaatctgccgcccttatttgttcaaatccttcctgcggcggcagaaagggctccagcgcggaccatacctggtccactgtaatttcctcaatggcgccgggggaaaccaggttggaaatgcaccgggcagtaatggcggaattgcgcgtccggtggcagaaaatggcggtcacgggcaccccggcataggcacacatatgtgtaggccccgtatcattgcctacacaagccagggaacgcaaagccatctggggaatatccatcagggaagacttgcccagaaaactgacagccaggggagagctggcggcaatggcctccacttccgcagcctccacccgggtgccgatgacaacggaggacacgccccgcgccgccaggcgtttcgccagggcgcagaaattctccacgggccagcgcttgtagggatggttgggggaacagcccggaatcatcatcacatagcgttccggaagctcgtcaaaatgcagcccctccccgtgcatgaaagaaagatccgtcaggacgcgttccaaacggaacggctcccgttccaccttcccccaccggaaggatttctttttcagcaatttgcgccgttctccggaattgcaggccacccagtccatgtcatggttcagcaggaagcgcacggcgggataatagcgtttcctggtgcgggaagattcctgaagatcgtacaccacgtcaaaattccctttcacaatggaacggacggccctccaggtggcgcccagcttccagtaaggcaggcgattatccacaataaaatcgtcaaacactccgagctgctccgccatgggaacaaacattcccatggtcatcagggtgatatgcgcctccggatgaagttcgcggagccgcttcatcgtccccatggcgagcaccacatcgccaagggctccatgcttgatgatcagaatgcgctgtgcgggcatgggagaaaaaaggaatgcgggttaaacgtaactgtcttccctgtccagatactcctgcacgtaccggcgcacgccatcctccagggaagtcatgggcgctgcgtaaccggcagcccgcagcctggaaaggtccgcctgcgtataatactgatatttccccctgagctcttcaggcatctcccggtaggcaatcttttcctggaggcccagcgcatggaatgccgccttcgccagatcgtggaaagagcgtgccttcccggaacctacgttgaacaggccgctcacctccggatgctccagcagccaaagcaccacatccacgcagtcgcccacccacacgaaatcccggagctgccatccgtcacggtagtcgggatggtaagatttgaacagcttcaccgtttcattggccttcacttgggggaatatatgggccaccacgcttttctgcccgcccttatggtattcattagggccgtacacgttgaaaaatttaagcccggcgtattgggggggaaccggacgcccttctttcacttcccgggccaccttgcggtcaaacagggccttgctccagccgtatgcgttcagggggcgcagcgcgttgacgtgctccagggaggcgtcatcgtcaaaccccatggaaccgtccccgtacgtggccgcggaggaggcgtaaataaaccgtttgccgtacagggaacaaaactcccacaaatgccagctcagcgtgaaattcgtccggataatcaaatcggcgtccgtctccgtggtggcggaaatggcccccatgtgaataaccgcctccacctcatccgcatgcgccttcatataatcaagcatgccttccggagaaaccacggcgcacagctctctcttggcaatgttcctccacttgtcggaagagcccagctcgtccaccaccacaagatcctttttaccggctttttccagagcggcgacaatgtttgagccgataaacccggccccacccgtgacaataatcataagaaaagaatcaataaaaaagttgtacggccttttgtaccacatccacccgtccctaggcaactgccatttaaggcgttccccggctcccaattttcaacgaatttacaatccggacactccaaaccctgactgttccatgcggaaaaccattgggccgcaatccccgcgcagcctgcggagggtgcgcccctcaaatcctcttttcatactggcaacgttaaaaaatttcggtaagacctgtcttgcaaaaattatcattgaccacggattgtaaatccgttacacacattcccacccctatgatccccgatgtttccatcattgttccctgctacaatgtagccgcttacgtggacagctgcctggagagcctggtacgccagactctccggaacattgaaattatctgcatcaatgacggctccacggatgagacctggacacatctgctgcgctggaaagagaaggacagcagaatcatccttctgaaccagcggaacgcaggcgtctccgcagcaaggaatgcagggctggatgccgcccgcggcctttatgtcggttttgcggatccggacgactacatggatccggaaatgtattcccgccttttttcggcggctctggaatatgacgcagacatcgtggaatgcggcaaccatgtttttgaagactcgtcagaccggcttatcgaaaccaaaagaagatcaccctcccggcattttgaagagaacgcctctccggccagcttcttccgggattccatctgggggaaaatggatatctgcgtgtggagcaaactgttccggaaaagcatgctggacgcccaccgcctccgcttcaacgtacatctgaaatccggcgcggaggatgaaaccttccggctgatggccgttccccatgcctcccgtctcctgttcattcccgactgcctgtattactaccgccttatgcgcaacggctccctctcccgccgctgcaacgttcccacctactccaaatgcgtgcaggaattccagcggttgctgtacattgtggactactggcagaaacaaggatggcagaatgaaggcctgttcgcttatggcgtccggaaaatcaggcctttttttgtttccaagcatccccttttccatcagatgaccgctgtccagcaacgttccgcgctggactggtggagcctgttctatcagaaggcggaaggaaaacgtttcctctccgctctatcgggacgggacaggcaactggcggacctgttgaactcggcggaaccggtccccaacggctgggggcgcattctgctggcagcctgctccctgcttcccggacaaaaaggacgttattactcctgcaaaaaaatgcttgcggaacatttttcccaagtctgccccaatgggtttcaaaaagaaaacgcttctctggaagagccgtttgacacatcgccgccttccctgtaaattgccttatcctcccattccggatcaatgaaccgttttctctcatttgcagactcccgcatgtcggccgccctggagcggctgggcaggcaggcggaagcgctggatttttttgatgagatcacgctcttcacggaacacgacctttccgcagaattcaccagccgcatgggccggtacctgacgccgtcctgccggggattcggatactggtcctggaaaccctgggccatccaccatgtcctccaagaaatggaggaaggcgaccgcctcctttatctggatgcaggctgccatatcaacgccaacggaacggagcgcttccgggaatacgtaaatatgctggaccgcgacagccgcggcatgctggttttcaccaacggacagccggaatacaaatggaccaaaggagatatcttccgccacttcggcgtttcccaagaagacgggcatatcacgcatacccagcaaattgcgggcggccatgttttcctgaaaaaaaacccgctcacggaaagcctgatccgggattggctccatgtcttttacgaccatctgcatcttgcggacaacactccttccgcctcccccaacctgccgggttttgtggaaaaccgatatgaccagagcatcttttccatcctatgcaaactgaggggcatcaccaccctcgacggatcggaaacctatgcggaaaactgggaacagctctccttgtttccattccaggacagacgggacatgggaatcccacgggccgggaaaaagggatggctggaaaaatgcaggcagctccttctttcttccaaaagaaacggattaggaatccggtaaagcttccccattcggaacaaccgggctgcacgacgcttccaaacggggcaatctgacgcaccatgaactgttttcccgtccttttccacagcttcagcccgaaaattcctttacccttcggctgccgtttccggaatgtaatgacggttatttggacaagctcttttcatttgatcaggaatgttttgccttcatgaaagcaaacatccctccattccaaaactccgcacccgcactatcctccgccgacattctcccacccctactcacagttatgccgtcaccggaatccggctttcccccattcatatcggaatgaaaataaaaaggccatcatgctgggaacagcctgccgcagttcatggaatactggcagcctggatttccccaaaacgtttttctttcagatttgtaggcttgacggcggattcctaatcctcatactttcctatgtggcttctcctcaatgccgaacaatatttcaagtctcccatagcgtctcggccagctccgccccttaccggttgagcgacgctctgaaccggcatattcccggcctgaaatccaccctgctgctccggaggcgcaaagaaattgacggcctggaaatccacaggacacccgtcagaagggctacggacgccttgcgccgccatctggcccatggatttgacattctgctgccggaaagaagaaaagacctgcctttctccctgaatgtgctgggcatgggatttgacacggcccaaatggaaaaagccgatgtagtgcatctgcactggataggcggcagaaccgtggatttctcgcagctgcgccatatccgccgtccattggtctataccctgcacgacatgtttgcctgcaccgcgggatgccactgcaccatggactgcggcctgttccaggacgaatgccgcggcaactgcccccagcttggcgctccccgcctcttccgcaacattccagcgtggctgttttcccgcaaacgccgcgccttcggccgcatcccgtcccttaccctcgtaactccctccctctggttaaaaagggaagtggaaagaagctgcatgttccctggaagaaaaatcgtacagatttacaatcctgtggacacggaccttttccgtccggcggaagaccggaatgccatccgggccggcctgggcatcccgcccggagcgttcgtcatcgcctgcggcgcaaccggcctgttcaatccggtcaaaggcggccatttcatccccctggtgctggaggaactataccggcgcgggcaccggaaccttcatctcctgctcttcggcaaccaggaaaaaagcgtggactaccccttccccagcacaaacgccggattcattacggacatgaacaagctggccgggctttacagcgcggcggacattttcctgaaccccacgcttcaggatgtcctttccaacgtagcgctggaatccatggcctgcaaaaccccttccgttaccttccggacgggaggagttccggaagcggttctggacggaaggacggggctggtcgctcagcagggggacctgaaccaaatggtcgcccactgcgaacggctcatccaggacggaaaactcctgcaaaccctggcggaggaaggccgtcggcacgcggaacaaacattctcctaccccgtcattgccgcacggcacgccgccctgtatgaggaaacgttccgggaataccgttacgaagagtgaaaacggccggcgttcaaccgccggactgcctgttccagcacatccgggcgcatcttcctttgtcattgacaagaaaaagacgcctcatacactctgcaccgtttcaacccttctccccccatgaaaacgcttaaaatctcctttttacagtccactccggatttcggcagggaaggaatgcttcagcttctgaaaagccggtatcatgtggtggaagacgattccgattttgattacctggtcgccaccccctggttttacgtcacccgggaggctttttacgattttctggaacgggcccccggccatatcaccgtcatgtacggctgtcatgaagccattgcaccggatttcatgctgtttgactattacatcgggctcgatacggtgcccggaagcgaccgtactgtcaaacttccctaccttcgccaccatttggaagaagtgcacggcggtaaggaaggcctggatgcccatgctctcctggcctccaaaacgggtttctgcaacttcatttacgccaaccgcaaatcccatcccaacagggattccatgttccacaaactctccgctttccggttcgtcaattctctggggccccatcttaacaacaccccgggcgacggccaccgggcggaagactggtacgcatcctccatcagaatgaaaaagccgtataaattctccattgcctttgaaaatgcatggtaccccggctacaccagtgaaaaaatcgtcaccagcatgcttgcgggcaccattcccatttactggggaaatccggacatcagccgggaattcaattccgcctcattcatcaactgccacgacttcccaaccctggacgacgccgcggcctatgtgaaaaaagtggacgaagacgacaacctgtggtgtgaaatcatgtcgcgcccctggaaaaccccggaacaggaagcccgctttctggaagagacggaaagggaaacggccaagctttacaaaatattcgaccaatctccggaagaagcgcgccgcaaaggtgacggaacatgggtatcctactaccatcgctttttaaaacgcggccacaggatgcagctggcatggcggcggctgaaaaaccgtctgcgccgttaaccaacgtttccgggcaattcaaccccatgccggatttcctctgtccgccttcccccgtccccatccacttccttccgcttcatgagcaaatgcttttctgaaaccttttgttcaccttctccccaccaagccggaggcgccatccacggaacctatttcccgcacattgacggcctgcgtacttttgccgtgctggccgtcgtcctgtaccatttgcaggaagggatctgccctggaggctatgcaggcgtggacatcttctttgtcatctccggatatctgattggcggaggcctcatccgtagcctgaaggagggaacgttctccgtgacctccttttacctccggagaatcaggcgcatcatgcccgcctacttctgcctgattgcggccgtgctggctttcggctgcgtcgttctggactgcgatgacctgcggactctgggccggacggtgagatccagcgcccttttcatcaccaacacttacttcagcagaaccacaggggattacttcagcccggcggcggaagaaaaccctttgctgaacctgtggtccctgagcgtggaagaacaattttacctgatgattccgcttaccctgtggctgctctggaaattcagggaaaaagccgtcaaacccgttctatggggggcgctgggcctctccttcttcgccgccgccttccacatggggcatctggaacataacaaggccttctatctgctttactgccgcgcctgggaacttctggccggctgccttctggctctggctcccgccgcggaacagaaccggggaaccggatggctgcggacggcgggatgggccggaatcctgctcccctttgcctgttatacctcttccactccttttcccggatacacggccatcccttccatcgcgggggcggccctgcttatccgttacggaaaccatggctggtccgggcgtatcctcaggcacccgctcagcacgggcatcggcaaaatctcctactccctctatttgtggcattggccagttatcgtgtactggacatacgtctgtttcgatgaatgctctccctgggattatgcgggcatgttccttctctcccttcttctgggtttcctttcctggaaattcgtggaaacccccttcagaacgaccgtctcatggcaaactcccggaaaagcgtttctggccacggcagcagggtgcctcatgctgggatttgccggtgaatggctcaaatggacggacggcgcgcgggattactggcatgtagcggccaacagcatggaattccctgaatactggaaagggccggccttcccgccctccttcggcatcacgcctcccagccgggcggtggtggaaaagggcaacgccattcagcaccatcatccggagctgggggatgtgacggattacccttttgtcctgctgggaaaaaacgggcaggccccttccttcctgcttatgggggacagccatgccatggccagttcccccggatttgacgaggccgcgcggcttcttcagcgctcgggcctgttctaccgcgcgcgcctgtgtccgctgagcggcatctccggctccggagactcctcttccctgacgctcctgcgcctgatgtacccccattgggaacacaatatggaactaattctggactggctggaaaataccccccaggtaaagaccgtattcatccacaaccgctggattgaactggtgaacaaccaccgggatacgcgcctgaaacaactggttgcagacggcctgcgccacacctgtgcgcgtcttcggaaagccggcaagcaaatcgtgctgctgggtcccgttcccgaatggactttcggcccgcgcaagctcatgcggcgcaatgccctgctgaacgccaaccggacagaccgcctgctgggcggggacttcaacacgcggcagcgtccggtattcgccctgttggagcacatggaatccacaggcctgtgccgcttcattcccctccacggcaccttccataaaaatgggcggtggctggcggaagacagcggccaattaatgtactgcgacgacaatcacctttccccctacgggtccagaaaaatggtcggcgacatcatcgaccagcttttcccgggaatggaaagaacagcagccaactgacggaagctccgcacggaaaaacatccaatcctttgacattgacaaggcatgcaggccccctacactggcgccaggcagtaaagccttcgcgatggtcccggataaaagcccggaatatgaaggccataccgcgtccccctattcaacgcctgtactcccatgacggattcctcccgccccacacgcatcaaggtcatcagaaaatccatgaaggcctctccggatcaaacggaatccctgttgtggggcgactgcctgttctgcacggacgccgccatgacggattacgactgggttctggtatacgacgaatttcccagaactcccgtgggcaccatcaggaatgaaacggaaccccttctctgtcctccggaccagactatcctgattacggtggagcccccctccatcaaaatctacagcagggcatacaccagccaattcggcaccgttctcaccacccactccatccgggaccttccgcaccccgggcacaccttgggccgcggatgtcttgaatggctgtacatcaagcccatgcaggaaattctggaccagaaggaattcccgaagacaaaaatgctctccaccatctgctccgccaagcagcatacgcataccatgcataaaaagcgctatgatcttacgcgttacctggcggaccgtctgccggaactggactggttcggacacggcatccgggaaatagaaaataaaaccgtcgccatggatgactacaaatatcatctatgcgtggaaaaccatctggaaccccaccattggacggaaaaactgtctgatgcctttgttgccatgacccttcccttttacgccggggatccgttggcaacggaatgcttcccgcaggaaagcttcatccccatcccgctggacaacccgcaaaaagcccttgaaatcatccgcaaggccatggaggacggagaatatgaaaaacggctccccgccatccgtgaggcaaggcgcctggtgctggaaaaatacaacatgttcgctcaaacagcggcagtcattcacaaccacagggaaacgggaaccatacgccccggagccatgctgaaaggacgccacgttctgcggaaaaatccgctccatgcccttcgggaattgacggacacgctggcctataaaatcaggtcgcgcggcaggcgcggaaccggaaccggagcataacctgaattccgggcgcgcggcagcgggggggggggggcaggccttccctgccagtaaagaaaatgggcgtccgatcttctgccgatggccgcgcggctggcggaacggaaagcttccatgtgatggaaagattcaaaaggaacgctttccccggtacccagcctcctgcccattaaagcatgaacggctccgtcaaccctcttctcagggaatacatggcctggaaccctttgaacgacagggaaaccgcaaccgtatccgccattcctccgccacaccgcaaccagggcggcaaataccgtcccgacagccccgtccggtctgaaatcgattcaaaccggacggaaaacaggcaattaataaaacggaaaaaccttaatctgctttgcgggaagcgtgcctcttggcccgttcctcctcccgctgcttcttcaggtcttccttcatcttggccttctcttcggaatccagcttgccgtccttgttaacatcatatttttcaaggagggcggctttcttttccgcagaagtcattctcttgggagcgtcttcctccgccatggaaggcatggcgaaagcaacggccagaacaataagcaaatacttcatgattaaacggggttcttgaataatccttttctactcccgcgcgtcccggttgtctctctttttttagcaatacatgcaaattccccggccatgccccttttccgccgcgtaaactcccccccggttaagccttcccgaacgggaaaaatagcggaatcaccactaccatgaccagccccatgatcacctgcaggggaacgcccactttcacgtaatccatgaacgtatatttccctgccggcataaccagggcattgggcggcgtggaaaagggtgaagcaaaacacatgctggtgcctacggaaaccgccagcagcagcggataggggctgatgcccatactcgccgcggattgcagggcgataggcgccagaagcaccgccgtagccgtattgctgataaacatggtcagcagggacgccgtgaaatagacgcccgccatcagggcaaacggcccgaatccccccagtccgaccaccagcccgtgggaaatggcctctgaggctcccgtcttctccagcgctacggacatcggcagcatggcggcaatcagcacgatgctctcccagttgatcgtccggtacgcctcctccacattgcgcagacagccgcacaacaccatcaggacggcggcaatcaataccgccgccacagcaggcacccagttgaacaccatggccgcaatcatcagcagcataatgcctgcggccaggggggccttatgcgtcagggtcaccttggaggcctccgccaggggctggcccacgacaacccattcaaaagttttctcgctcaggcgcgcaatatccgtccaggttccctgaatcagcagcgtatctccgtactggagcttcacatccttcaaattatggaaaatgtaatggttgtcccgctggatggccagaatattgaccccgtacttggcgcgcagccccgaagacttcacgggcatgttgataaggtccgagttccgcatgagcagcatttccgcaatgcctatctcgtcaaacttcaatttgcttttcaacagggaatccgtatcttccgacgtcttccggttaatcatctccgccccatattcccgggcaaaacgggccacgtcctcaaactcccccatgacataaatgacgtcgccccgggccaccctcgtatctgaacccgccatggtctggctgaccgtctgcaggaaggaatgccggccggaatgcctgcggcgcacctccacaatattcacgcggtaaaggtccggtatctgaagatcatgcagaggatgttccgtcagaggggaatcctccagcacccggaggcggtaaagattattaataatctggtactcgtctatcaactggctgagggatttccccttggcctcgtgttccgccctgtcgtcatggcgtcccagaaacctcctgctgagggggatcagcaccaggatgcccgtcacgatgcagacaaggccgatgggggtgaacgcaaaaaagcccagcccctccattccggcctcctgaagctggttgttgacgacaaggttggggggcgtgccgatcagcgtcagcatgccgcccatactgctggcaaatgccatgggcatgagcagacggctcgtctggatgcctccgtccgcagccaggctcaccaaaataggcagcatcagcgctaccgtccccgtattgctgacaaatgcgcctatgccggctgtaacaagcatggtcagcaccagcaggcgcaactcgctcctgccggccagtttcatgattctgccgcccatcatcttggccaggcccgtccggaaaatggcgcctcccaccacgaaaagccccaccatcatcaccacaatggaattggaaaagccggaaagcgcctgttccgggctcaaaatcccgaacataatcaggcagagcagggaacacagcgcgacaagatcagaacgaatcctcccctggacaaataaaacggcggatactcccagaatgagaagcgtggtcaacatagcaataaacggcaggagtgaaaaaacggcaagggaggatatctaacatgaccggcacgtcttgtcgataggctgaacaagtcattcacaaaaccgtctctccgccggcatccggcagaaaaaacactttatgcatcctgctcggagaaccccgcttcctctttccttctccggtatcatggggatgaggaaacaataaaaaacgcgctctctgaaagaacgcgccataaaatgaaaagtggtgggtagagaaggattcgaaccttcgaaagcaaatgctaacagatttacagtctgccccctttgaccgctcgggaatctacccacttgaagtgatgtgcggcgaatgtatagggattcccgtgccttagcaagttttttttataaaaagtaggtcctcccagaagcagaaaccccatatgcaacagccatgccgccggaaggaaagcggatgcaggaacacaaggccggaaaaggcaatgttcacgaatctcccacatataccggagcgcggctgtccggggaatccgcatccagttgctccagctggggcagaatgttctccatgctctcccatacggagggaacaatcttgattgcggttccaaaccggactgccatcatcagggcgtctgaagggcgggcgtccagctccaccagcttgtccatcacctcattggcggcctctatggtcacgcgggcataaaagacttcatccttgcggccgttgataagcaccagcctcacccggcattccatggcggataaaaagtgagccagcagggaagacgtgtccggccgtaccgggcgttccccgttcaggcagcgttccagggccatgccgtctgtcagctccatgaaaatgacgcccaccttgccggtcagcggatcacgcaggcacacacccgccccggcccgggtgtaaagcagggcataaggttccagagcaatcaaattttcatccggcatggcgggcggaaatcacatgttaaaaaccgggattaataacccgttccgtatagcgggcagccaccttgacgtatttttccgcccatttgtggttattatccgcggattccggccccaggtccttcaccaccttggcaggagaacccagcaccagggaattggggggaatgacggtacctttggtaatgagcgcgcccgctcccaccacagacccctggccgatgaccgctccatccagaataatggaccccatgcctatcaggcaattatcctccaccgtgcaggcgtgcagaatcacgccgtgccccacggttacgtacttgcctacatagcagccgaaatcgtctgccaggtggatgcagctgttgtcctggatattggagtaatcaccaatgacgatcttattgatatctgcgcgcagcgtggtatggtaccagacgctggcatgttccccaatggtaacatctccaatcaaatcagcgctttccgccacaaaagcggtatccgccactttgggccagaagttcgcgtaaggttctcttgccatataagtcatgtattaattgaagataagacagcattccagtctaaaaacgttcattccgcgggtatgccgcagccggaaacgaacacggccgaacccacccgaaaatgaaaggccgcaggcacctccgcactaattttcttcccggatgcccttcttgctgttcttctcccgcttctccgcatccttgcgcagggagtcggcttttttcccattacctcccttttcataatacccggctatcctccgctggatggcggcttccttctttaccttgaaataatcgcccgatttagtccggatataccggttgtaggaagattccgcctccttggccagctgaagcacggcctcctgatcctgggaaacgtactcgtaatattgccccatcagcgcttcaaatacttccgcgcggcgcgcataatccttcatggacttccggtacagggcagccaccccggccttgtccccgttttccatcaggagatccgcctgccgcttgatggcggcggaagtcaggtcgctgcgcccctcgtccgtctccttttccagcttcttcaaatcgcgggcaacatggcgcttattggtggaagcgtccctcatggggaaaatatactcatcttccacgcgggcggccatggccaggtaatccggacgggaacggaacttgcgcttaatcatggccaccagttcatcccattcttccagcttcgtgccgctctccgggcggcccatcagagcaatcaggcgttcccagcccagggggctgccgggagtggcctgagtggcggcttccagcattacccgggcgcaatccggcttctgcatctcctcaaacaggtccgccagggaaagataatccagggaagtatccagccgggcgccattcaccttcttgtccataccctggagaagggtggattcatgctttgacttgcagttgtgtggatgggaaaaatgccccgtattatatccgtacccgccgtaggactgccaggtttcatccgtcgtcagcagattgacccaggcatgcggcccgcggttgccgtccccggtaacataggcggagggaatgccgttgcatttggcggtattcaccgcaaaataggcctggtccatgcaaatgccgccttcatccagaatctcctggaaggtataattagtgtaagggtccttgcccagtgcggcgcggtccatccggtaacggatcatggaataggctccgccccatcctttccgggtaaggcgcacctttttgcgcgcccaatccatctccgacctcggcagacgcacatccaccacaaacaacagctcggaagggcttaatttggaaatgtccgtgagaagctcacgggcttcatccatctccatgaagtactcgaatacctgttccagcgtcaaaggcgtggtggaaatattggtggaagaagacgccctcagcttggacgggctggaagcgatgcggggattcagcatggcgcaggccagcgccagggaggaatacctgctccggggcatggcggaggttttcatccagaattccgcccacttcctcaaaatccctccccactcctccccgggtgtctgctcccgcgccatcgtgcgcaggaaaagtctgaggggatcggaaggatctgaaaaaagccatggatagaaatacctgggggaactctccttgatttgttcctggatggtttccgctcccactttgctgatgagctggtacagctcattggcgcgcatgaggtacgggctctgatcgtacatggacgcgtcaaatttgccgaatttgatgaccttcacggcatcccgttccaaattggagcgcaggaaatcggcatacaagtcatagcggcccgtttccagggccagattgaaagcatccgtaaacaactttctgttggcggcgttattggccttcaggctgaccagaagaacaggcttcttgaaaatctccagccgcggatcttcctcctggaccacgggttcttccttcggttcctcaggggaaggctccgccacttccggttccttgttctgccgttttccggtggcttcctcagcagccaggcgttccgcctcaagacgggctttttcctccgcctccgcgcgcgcccgttcctccgccttcctgcgcgccgcctccagttccgcggctttccgcgcacgcgccgctttcgcttccgcctcctttctggccgccagctcagcggcggcagccttacgttgaacggaaacccggtggtaagccacccctccggcggcaagagccagcaccaggacaatagtaataataattccgccggaagaggattttttatgcttgggaaaaccgggacgcagaggattgacaggattcatggggatgcagcttgaacgcgttgaagcaaattggggaggggatgagacggttttatccctgttccgtgtgacataaaagcgcaatacctttccaaggtcaacttgaaacaatggtcttttgctgaaggttcgttttcccggaacccgttaagaatcaaaccagattatttttccttgtattttcatagccattttatagtatcaggcctcttcatgtttccaaaaacatgagaaaaacacaagtatcctgctgattattcctggctgacatatgtttttcccgttgcctatgaacactttctctcatctcagtccgtttctggccgtcatttcgggaagcctcttctccggaacggccctctgtaacgacatcgtgctgcctccgccagataaaaagggaggaaagcccctcatgcaggttcttcatgaacggcattccaccaggtcctttgcagacaaacctatccctgtggaagtcctgtcctccctgctctgggcggcgcaaggcgtcaatcgggacgatcccgactatcgcacggcgccgtcttcccggaattccaatgaaatagaaatctatgtcgtcctgccgcagggcacctatctttacaggccggaaacccaccggctggagaaagtggttcagggcgacatgcgggccgctacgggaacacaggaattcgcggctaccgcgccgttaaacctggtctatgtagtagaccagtccaaacagccgggagactttgatgccaggagaaagctggtcacggcctgcacggatgcggggtttattggagaaaacgtttaccttttctgtgcttccgaagggctaggcaccgtgttccgcgccatgattaacgccaattatatccagcagtgtctgaagctccccgtcttcaaaaaagtcctgtacgcccagagtgtcggctatccgtcaaaatcctgaaaaaaccataagccggaacgctgtgagactcgccgttccatcggcggatcttcctcatgcctgcgaaaaaccgtcatgggaaccgccgttcccatggaaataaaaacgccaggaaccattgccgggccagtcaggagcgcactcttccggacagcccggcaacaatagaaaaagcgtttggcgaactgttggatgaacgtttcgggcaagcccggttccgccactccgccctgcggcattggctggagaaatgttcaaaccggaattcctgggaaactgcggcgccaggaaatctactccccgcttgcggtctttcccatagttcaaattcatggaaaatccggaaccgcaagcggaaaacgcaccagcattaccactggttgtccaggtttttggtatttatctttccgggttccttgttgcgttccttcatgccgcggacaggcttgggctccttttcgtgcaggtccagaatatcaatcacattctccccttttttcaggaatggggccgggacatacagccttaactgaggtcccacattccaatagcgccccacgttgattccgttcacccatacataccccttgacatagcgggacatatccagaaacgtatcctgaggctcttcaatatttacaacggcccggaaatgcgccccttcccgtttctgggaaggcccctttcctttgggagcccgcacaatggaatcagctttcaggggaagcgccctcaccgtccagttctttaactcccgcgttcccagtttcacaggaccgtaaatccccttgcggtcactctccatgctgatatgaaaattaatatgccccatggcctctaccagaacttccagcgtccccggcttcctgcgctccggcagtttcacgctcttctgccccagccgccgatccagcgtgccgaccagctctccatccagatacacctgggcatagtcattgacattggtaaattccagcgtttcaggcggtcctgacggaacggccgtgctgtaaacggcaataccctggttctggttccattgttcaaaatagggaggctgcgggaacttggaccggaaaggcttgggcaggttctcccaaaggccggcatgcactgcgggcgtgaactccggaatttccatggccggaatgtccgcgggaggttccggcacagcggcttcgggaggcaactttttcaaaatgatttccctcatctgggcataatattcattcatccgcccctgctcatccacgggagaaccgtaatcataactcgtcaggtccggctggtattttcccggccctccgttgttggctccggccgagaatccgaaattggtgcctccgtggaaaacgaacaagctgaaggaacgccccttgtccataaaccagcggacgtggttgaccactccaggggtgggagcccaattcccctccccccagtgccgcagccagcccggatacgtttccgaggaaaaaacgggaactcccggattgcatttattagccactgcccaatggccgtcgttcagccccggatccagccctacggccacgcctggaagcaccacacctttcagaaaatgttctcccgcgccgtcggaggtgtaaaaggggccaaaacccttcctgctccagaacgccttcagccattccatatacttgcggtctttacgctggtagctcccgtattcgttttcaagctgggtcatcagaatagggcccccgtttttggctaaaaaaggctccgccacacgagccacggcctccagataacgcgtctgcgccttcatgaatttggcgtcttccgtagttctcaacttggccttgggatccttcagcaaataatgaggcagcccacccagatcccattccccgcatgcataggggccggggcggaataaaacccacatgccttcctcctggcataacttgaggaacccttccagatcccgattgcccgtcttaaagtcaaagctgccgtccggctgctcatggtcattccagaacacgtaaaatgcaatagtattcagccccatagccttggcggtcctgatgcggtgcctccagtattcccggggaatgcgctggggatgcatctccgcgccgcggatctggaagggtttcccgttcagcatgaactcctggttcccttccccgccgaacccgaacacaacggggggtcctccggaaagagcgggtttctgtacattctggacagcctcagggccagcccatgccaatgctcccactccgacggccatcagtgcggcagaccaactgaaaccatattgcttcatcatgttgaacagttaattcatttgaagacggttgccaataacaatttttttctctcttctccgaatcttcggaatacccttcccctccgccagaaatctgacggggccggacggaacggaggccttccgttccgtggaatgtaatcatgtcatatatcttcatccctttgtatgaaaaccggaggacgcctgtctaaattgatcaatatgaaaacaattgttcttcttcgccatggagaaagcacgtggaaccgcgaaaacagattcaccggatggacggacgtggatctgacggaattgggaatacaggaagccaaccacgcgggcgaccttctgaaagacaggggaatggcctttgaccatgcctacacctcttatctcaagagggccgtgaaaacgctcaactgcgtgctggaccgtttggaccaggactggctgcccgtctccaaaagctggaggttgaatgaaaagcactacggcatgctccagggtctgaataaaagtgaaacggctcaaaaatacggagacgaacaggtactgatctggaggcgcagttatgacgtggcacctcctcccctggcggaggacgatcccgccaaccccaaatgggatccccgctacaagggagtgccggacagcgaacttccgcgaacggaatcactgaaagaaactattgcccgcatgatgccctactgggaagaaacagttctcccttctctacggacgctggacaatatcctgatcgtagcccacggcaacacattgcggggcatgatcaagtatttgaaaaacattcctgacgaacagctgctttcccttaatcttcctaccgccaccccctatgtatttgaatttgacgactccctgaacctggaaaaagactactttcttggggatccggaagaaatccgcaaacgcatggcggccgtcgccggccagggaagcgcaaagaaaaaaacgcctgcggaataacctcactatcctttcctatgaccgcccattcctgccgcattgcgttctttgacgccaagccctacgaccgggattccttcaattctgtcaatgaacgcgaattccattacgacatccgttacttcaaggggcacctcactccggacagcgtgcccctgacccgcggtacggacgtagcgtgcattttcgtcaatgacacggcaaaccgggaagtaatacggaacctgaaggaaaatggcgtcaaattgctggctctgcgttgcgccggattcaataatgtggatctgaaagctgcggaagaagcggaactgcccgtcgtgcgggtgccccaatattctccctatgcggtggcggaacatgccgtagccctaatgctttccctgaaccgcaaaatacaccgcgcctactggcgcaccagggacggcaatttttctcttcacggcctgatgggctttgacatgaatggaaaaacggccggcatcatcggaacgggaaaaatcgccagaatcctcatccgcattctcaaaggcttcgggatgaacatcctggcctatgacctgcaccctgaccagcgctttgcggaagaagccggcattacgtacaccaccctggacgatctgtacgcccggtccgatatcatctccctgcactgtccccttactccggaaacggaacacctgattaatacggattccattggaaaaatgaaggatggagtgatgatcatcaacacgggacgcggcaagctgattaacacggaaatgctgattgacggcctgaaatcaaaaaaagtgggagctgccggactggacgtgtacgaagaagagggagaatatttctacgaagacaaatccgacaggattattgatgacgatactctggcccgtctcctttccttcaacaacgtcatcctgacttcccaccagggctttttcacgaaagaagccctgcacaatattgcggaagtcaccctgcacaacatccgggactttctggaaagcaaacctctgatcaaccgagtctcgcttcagtcacactgaacgtgcccggcgggcgctctacggaaatccgggactttctcatccgccttctgccggacagaaggcggaattcggggaaaggcggcagtttttttatgcaagcgccgccactgcccgccgtattatatactatgagcactccagccccagcctccgtcctggctcccaaaccgcactacgccgctctggacggcctccgcggagtggccgccgtcatggtggtcctgttccacatgtttgaaggcagcgccagggacttccagttccatacggaccagatcatcaaccacggctacctgtccgtggacttttttttcatgctgtccggcttcgtcatcggatatgcctatgacgaccgctgggaaaaaatgaacctgtggaacttctgcaagcggcggctggtgcgccttcaacccatggtggtcatggggatgctgctggggggaatcctcttttacttccaggggtctgaaatcttcccgaaccttgtgcaaacccccgtatggaaaatgctgctggtcatgaccgtgggattcacgctgctgcccgttcccgtttccctggatgtgcgcggatggtcggaaatgcacccgctgaacggtccggcctggtccctcttcttcgaatacgtcgccaatatcctttatgccatgctcatcagaaaatttaccagcagatggctggcggtcctggtctttctggcgggctgcgccctcattcaccagtgctacacgcagggcaacaacatcggcggctggactctggatgcggaacagtgccgtgtggggcttacacggctcatgttccctttcttcggcggtctgctcctgttccgcctgtgcaaacctggacggatcaggcatggtttctggtggtgcagcctgcttctggcgggaaccctggcggcgccccatgtaggaggcgcggaacatttccgcctgaacggcctgtatgacgccttctgcatcattgtcatctttcccgtgatagtcttcctcggagccagtgacatccctggagacatctcttccagagccagccggtttttgggaaacatctcctatcccctttatatcacccactatcccatcgtatatctctacctggcctgggttcacgatgcggaagtccctctttcccgtgcgctccccgtagcggtaggcgtcttattcctctgcattgccgtagcctacgggtgcctgaagctttatgacgagcccgtgcgcgcatggctttccaaacgcgtgctgaagcggcgtcctccggaacccggggcgtaaagcggaacaaacatctgccttgccccgggcggggccaggccggatactgtcggcggtctttcatggaaaaactgccgacatcctccaaagctctgcgctacctgccctttcttgtggcatcggcattctttatgcagatgctggatgccaccatcctgaacacggccattcccaccattgcccgcagcttcaacagtcatccgctgcagctccactccctggtaacggcctacatgctcaccgtctgcgtcctgataccggcctccggatggatatccgacaaactgggttcccgccgtactttcctgctggccatctccgttttttccgtgggctccctgctgtgcgccctttccgcctccgttaccatgatgacggtatgccgcgtcatccagggaataggcggcgccttcctgatgcccgtcgggcgccttgtcatcctgcgctcctatccccgctccatgttcgtcaatgtcctgaacattgtaacgattccggcgctgctgggcccccttctggggccggtgctgggcggtatcatcgtacagtacgcttcctggcactggatattcctgatcaatatcccggtaggcatggcgggcctgtgggctacctggaagctgatgccggacctgaaagcggtccgggaacagaaattcgactggccgggtttcttccttttctcctcctccgccgtcctggctacgatgggcctctcttccgcaggaggtataaccgataaaacgcgcatggtcatcctcacgtctgccggaggcattcttcaacttctgtactgggtgctggcgttccgttcaaaagcccccatcttcagcccggccctgttccgcatcagaaactttgccatcggaatcgccggcaacatcgtctgccgcctgggcggaagctgcctgccgtacctgatgccgcttttcttccaggtggtgcttggttattccgctcttcagtccggcatgtccctgattccgctggccctgagcaatctgctggcaaaaacggttgcgccgcgtctgctcgggaaatttggttaccggaacatcatggtcgtcaataccttcaccataggatcgctgctggcctccttccgctttgtaggccccggaacccatgaacttattctcctgggcatgctcgcgttgctgggcggggccaactccattcagttcacctgcatgaacaccctgacgctgattgacctccccaatgcagacgccagcagcggaaactccctgctttccacgatcatgcagctctccattgctgtcagtattgccgcggcctccctgctgctggacagcttcggcggccattcggctacctccggaaaggctgtggaaaccgcctttcatgccactttcgccaccatcggcgccattgccgcggccagttccttcatcttcgccctggtggacaaagacaagggaatcacccgcaaacggagaaaagcagcttgaagaagaaaattcccgcccctgttcaggaacaggaagaggaatctcccgtatcaagagaacagcactgcgcaaaccgggcgcgggactcttccagggtaatcggtttcttatcctcccccagggctacataaaccagctccgcctctgtaattttggcaatgttattgcaaagcttcgtcagacgttccgcatacacctccaccttcacggtgacggaggtgcggcccaccttgataatatccgtataaaaggacactacatcgcccaccagcacaggagcttcaaacgtcaggctgctcaccgcacgcgtcacaatatagcggctcaatgcatagcgcatggcggtattggctcccgcaaggtccacctggctcatcacccagccgccgaatacttccccgctctgattggtatccgccggcattggttccacgcgcagggcgggaacgcgcccttccggaagctgggcatgacgatatgtattttccataaataagaataattataaattgataaggacatgcttatctatcacagccctcttgtaaagggtaaaacgcggaagcggaaaacgggcggcgctggcacgctctgcgggaaaaagaaaacagcccggaataaactgctttcccatattgattaagttgggcaggcggatttccgtgtcttatcccggagcttttccaccatggccggtaaaggcggttgtccattactcatggaccgcaaccatgaatccaaaacaaaaaaagtggacggggaggcacatcccgcttccgactttgcctacgtacccgatccggaaaagccttccacctggaaactgccgattttcaacatgcgccacgtaggaggggccctggccgccatgaccagcgactatcgcggcaaccccgtggaaataccggaaggagatcgccgtgccgtcatgaaaaaaatcctggccaggaaagcgaaactggaacaggaagaaagctgattccgttttctttcatttctttttttccgcctgtaaacaggaaggaaagaaatatcttttcccttcgttccccggtcttagccgtttggggacgggctgacaccatccagataccggctttctgcggcgccttcggctggcacccccgtagaaatgaaagacattcccacccttccgacgctcctggcggatacagccggatatttcacttacggacggcatcaaaaacggtggtaaaacagaagaagaaattaaattattctaaaatcatcaatcatcccaaggatgtttttcccctaaagtggattggggaaattcaggaaatctgaaaatcaaataactttctccggccaataaaaacaacatttagaaaattcctatataaataaatatcaatggcatattgaaataaaaacatgtctttccctgaacaggccgtccgaagcctggtcatcacgacaggaatgaagaatgccggaaaagggaatgctgccggctatttcccgcatggcagcgtttttccccttccgtcaactccgcatcaaaatatgactgacgaaaaaatgagcacagaaggcactaacaaaatacagaacccgcgcggtgaattccaacaggaaagatatgaaaagcagcagcagaaagcccccggactgcaatccggaatgaagcccgtgccggattccggggaacaaagctaccatggctgcaacaggctccgtggacgaaaagccctggtcacagggggagactcgggaataggccgggcggcggctattgcctacgcacgcgaaggagccgacgtagccttgaactaccttcctgaagaacaaagcgatgccgaagaagtggcggaactcatcagaaaagagggccggaaggctgtcctgctgccgggggacctcagcaatgaagtcttttgtaaaaaactcgtcagggatgccttggaaaaacttggcggactggacatcatggccctggtagccggtaaacaagtggcggtggaagatatccgggacattaccacggaacaattaaccaagacatttgaagtaaacgtgttctccctgttctggattgccaaggaagcccttccgcatctcaagccggggacgagcatcattacctgctcctccattcaggcctaccagcccggcaagaacctggtggactatgcttccacaaaagcggccatcatcgcgttcagccgctccctggccaagcaggttgcccccaaaggcatccgggtcaacgtggtggctcccggccccatctggacagccctgcaagtaaccggaggccagctgcagaaggacctgccggaattcggacggaaaacgcctctcaaaagggcagggcaacctgtggaactctccggactatacgtctttctcgcctcccaggaatccagcttcattactgcggaggtctttggcgttaccggcggcatgcatctggcctgatgcggaaactcgcaatcctggaaaagggccggactgactttccggaatccctttccgcagcgccacccccccggatgaccgggaaagcggccggaaacggctctgcaaggaaatcagggcattgctccatttcccggttgtcctggcaaaaggtttctgcttgaatagggtaatggcattttggaggttttggttcatctttttccctttcacggcgcttctcttttccatggtgcatggcagtcctctgaacgcacccgtcatcacccttggagagaaaaaaagcctgttcggagaaaaagcgcaggccaatgaatatgtcagctatgccctttattactggccggaccccgccaatccggacggtccttacaaacccattgacggcaaaaagaacaaacggctccgcagcatggacgacagcggcaggatggccgctttcatcggcacggtctgcaacctgggacggcagtataaactcgacagggatccgcaggccgcctcccgggccgggcaatggctgaaagcctggttcattgctccggcaacccgcatgcagccccatctgaaatatgcccaaattcgccccggacaccggacggaaggagacggaggaggcatcatcgacctttaccgcatgcccgaattcctggaagctttgacggcgttgaaatgctccaatgccctaacggcagaagaatggaagcaggtgggcgcgtggctgaaccagtattacacatggctgactaccagcaggcagggcaggcatgcacacacgcgcagcaacaaccattatctgttttatgtggcgcaatgtgcctatttggcatccttcctgggccgcagccatgaagcggcccaatggctggcggaagccttcgccaacatggaccgacacatcgctcccgacggatcccagcccgaagaactcaaacgggcggaaccctggcaatacagcgtttacactcttcaggcatggggatacctggtgcatcttgcagaacgcatgggcgacaagaactaccgttaccggaaaacacccgccggggcttccattcaaaaagctgtggattatctcctgccttaccgcgccaaccctgaaacatggccctggcaaggctccagggcaaacactccgctgcccgccatctttgaaccggagcaggcgggcaggccacaacggaaatgctcctgaaccgcgcccgccgttaaaagcatccgtttttcctgcttattgaaaatcccctgtccagcagcatcacgaacggggcattttcccggaaaacgatttaataagggatctccccagtatttttccccttagatttttcctttctttttgctgctctccattcccacggagatatgggattcgggtcagaccagatgcctttttgggcctttctggcatccctttcaagagaaacgagctttcggctagcggaaaaatttttataaatccacgcccatccttccttcaccatctcttcgttgacgaacatttttccatgccatatttcccctaaaatacggtcgtacctgtcattctcggtataccggactgtaaccgcctctccccaaatcagcttttccaggtattccttggcgccttcatacccgtcctgccccctttccggcgcatcaattccctcaagctgtatccgatgcgtacgcatttgttcaggcgtcctttccagaaggatgaccgtgtcgccgtcaatcacgttaatcacgactcccctgatactttcagcaaaagccatgcagggacttatcaggaaaatcaaaagccatttcatgaaaaatgatataatccaaaaaatatcaggatgcaactactctttagagaaaccgttcccgcactgttcacacggccggaaacagatgaatgcggtcatctgtggacagcctgttctggaacaggccatcatgttttccggcatgaaggaacacaattcccgaacctattccaacctgtccggaacaacggtaaacaggctgtatcattgccccgctccggaacatctttattcgctgccgtgccgggagcggaagaacatcccgccggcgcaccccggcaatctaacccatgccgccatttaaaaagactgcacattaaacaagaaaaaccgggcgccctgcaacattcaatggcatggcgtgaggcattttactcattttttcaattcttcggctattctgccgaggttcttttccgttgcctttctcagtttctcctgctgtttccagtaccatgccgttctttccgacaccccggcctgattcgccagccagcgcacggcgccgctcgtgtcacagcctgttttcttctgaatgacttccagcagttgagcgacatatttattcatggattccgggttgatattatttcgattcccatgcccggctgaattcctcgtcccggaacagggaggcaatcccgctgagctgcttgaggcgcaacaattcttccgcgtccatccccagatttttgagtatccacgcatccgacatgcccgcctccgtcaactcctggataatattggtcatgagggcgatattatgagatccccgggcacggttgtgcctgatggtggaagccatgcggtttccaagaggcttgtcgattacggccaccggcatcatgccaccctcccgttcgtaaatatcgcggtaagtcttcatgatctggcagcggtggaacccgtccacgatttcataggtcccgtcctccagcttataacaaacgataggcatcgtataaccgtcctccttgatgctctggtagagcagcttcatttcggggggagctacgctgttcgggttataggcattggaacgtatctggtccaggggaacgcgccggattttgtaaacgggggattgataggaggttttcataaaatattgcggtatttattgacggcggcccggcgccgggcaatcgctcccttggttggaccgaacccggcgtacttgcaaaagtaatcattcttcatgatgcagatgcacatgcgcttgtaggaaggcacctgccggaaattgctgaccggcatgtcgtcgggatagcccataaactgaatgacgtcgcggtcgacgtaacggcccgactttcccgtcacggtcgccagaggataggcggccagcacttcatcggcagttccgggatcgacggtgccccctttcatccagtactttttagacctctccaaaatgttgttgtagtgttccgccgttttctcgttcattgtggaaagcaggaattcataataggacttccaggtatggccgggcggcagtttgatggttttccagcccatggccgtcgtacctccgtacaaacccgtgaagttgacgccgttgacgcgcccgaccatgcgcgcccagttggcaggatcaataactttgtaaagcttcaggctttcctgggcgcagtcattaaacgggcttgccacccgcatttgcccgatcgtaaggcctgcctggtacaggagatcgtaaaggcggttatagtcaaaaccaaaacgggcgttggccgtccagacgtcactgacgcgccagtcataaagagggtaggcgctgacggtcacggcatcagcccgtgtaatccacttccttccctcataagacgtccttttattgccgcgggcaacggcggcgtatctgttgaggctttcatccgcccgcagccctaccatgacggcagtacttccgtgttttttggcaaaatggcgtgaaagcttatcctggaattcatagtccaccataccgtgccggaacgggacgtccagattcttttcgttgattacatagggattttccggcatgggtcgcacccacagttttttctgggcggcgctccacggcgtccagtaaggttcccccagggagcatgcggactgggccctgatcggcacacagtaccacatcttacgaatgccggggaattgctccagaaatgttctggtgacatactcggtcgtcatttgatattgggcctcataatcaaggtggtacatggacagcttgtccagaaggccctgttcggcggcgtaacgatagcaaagattaagcatgacgccgctgtccttgccgcccgaaaaagacaccaggacgttgtcaaactcttggaaacaataggctatgcgttctaaagccgcctcataaacatttttatccagatatgttttcacaacttttccaaagcctgtctttcgccatccgccgccagccccctgccggacgggaacacgtcggcccggatatgattgccggaagccatgcattttccctgaaaccactcttgcagcttgcagctcatagggatatcccctgttctttcaaacagggttgcaacgccttcatttctgcataaataagcaacatcatgttttttcatgttttcaaatgcgcagcagcttatcgtccgttattttccgtcaacaataccaacctactgaattattgcggcgggtcaatgtttttactgcaattatttcagtaattttattgtcatcaccctccttctcaaaatacctgcgctttttagcgagcaacaccattccagaaatgccttatgcattgcgccatgacctcctttccttctccgcaacatccgcgctatgtgcagcattcaagacgctgcgttggaatgcacggttccaaaatcggagatacaaaaatcataacttgcttaaaattaggtgaacgaaaaaatgtacgactcagagccattttccggttccaacatctttcccccaatactctttccggaaccgcatcttccaggcagacgatacatccatcatttccctcctgaaggaaaaataaccgtgtttccctttttgcaatccgggatgctgtccaaacatgaatatgccggtacacgccttaatcatgccgtcagattagactttaggcgttttatgattttccccgaaacgccaatttcatgccagaacggaatcaaaaaatgacatttagtcagcacttatggttgtttttccgcggtttttcacctttccagcctcaaaacagacaaaaaagaagccctgcaatccattaaaattacagggcttagaaaattagtggctcccccggttgggctcgaaccaacgacctagtgattaacagagaactaataaatacgcataatatatttattattataatattacatttttattattacgccaatattacgccacagagaatttcaaacgtgaagatttatgcccgtttcttatcgtttctcgtatttctttttgtatggaagcggcatgccagatttatcaggcttggagaagttcggaatgcttgctgacaagctccagaaggcgagcagaagaaccactgggccgccgctgaccactttcccatttaatcagcgttgacaatctccatccaattcaggcagggaaccaacaaagcattcatcctcgtcgttccatctgataagccttgcgtaaggacgggcaagacgttttatttcattttgattcatgattttccgatttcgtctttgtccgggaacaattctttttttctatggatagcctggatgattgttctattcgcttttcatctgatttgacacgtctttccaacttcttgatatcttcttcaggggggagtttctctggatggattccacgtcccaccaacatttcacgaactcccttgttgttttgtatgtgttcacgtgtaatgtttggttctccttggagatcatttgcttctacattgtagttagtcatttcagtagccagactctttgccgcaatggttacagaaggaaggaaatctgccaaaggtcgattctgaggcattgccaactggtttttcatctgacttgttgtttttcctccaaaaagagcctggtcacctttagccctaatgcgtccaaagcctgcatcatctacccctcgttcataaatattttgggatagccgtttttcggattccttgagcttttcccttgcttcaagacgcgtcagcaggttcatacggtcttgaatcaattcttgccgccttgtttgaaccgcaaaatagcactgcgcaaaagctatttcctttttggacggatcgccgttttgtgcaatgaggtagcaggcataacgggtgagtttataatctaacacttcccgttgcccgcccttccctacgacgatcattttgttgacttcaacaaaatgatcggaacattgaaagccagacgttttgcatgattgtttcgctctatcaatcgcagtttcaaagttacgccattctttgtaccccaaatagggttgtagatcgcgagcgtaccagaattctactgacgcttccgaatccgtgcggacaatggaatcaaaatggctttgcaagatagttatttgatcgtcgttattcatcattttatctttttatggttttcaatctggtaatttcgatctatactaaagatggcagcatctaccatgagaaaaaaataacacttagtgtcatttccgcaaccagtatgtgtaaaagtcatggtacctatttcatgatcctacaactcatttcttcctcgtattctcggcaatctgttctaagagggaaataatatgagcaactccaatccatcccagcccagatagggcaagcacaaggaaaatggaagcagcgaaaatgctctggtcgctccctgaggacaaaagtataagaggaataattatagccagtacaaagcaaacgatacccacccaccggaacgcttcggatactccgcttgctgaatagttgtttctccgggttctttctgattcagcacaaatattcattttagaggaatttgacttttcgtgagttgcggaggaaagaaactccccatactttatccattcatttcccccctccctgcatataagggtctcaaaagtgatactcttacgtcgagccaaaacctctaacgtctctggatgaaaaggaccttctgtttttccttctggtgaagcaacgtagtattttaaggaatgacgttcctcattttttattattccgtaggaagaagattgttcatcctttaaaccaactgctgttttccgcgctaaatacactccaaaggtggtaagcaaaataacaccaattaaaataatgactgtacccataagacgaccataccatgaaaaagaaaatactaaagggaaaaactatcagcggaaaggtacattcaccgcaccaccagggcgtttttgcctctccgtggtgttggcccactttttaatagctttgatttctgcattaatcccaccgagtttactatttaattgattaccaagcccttcaatggctcgtcttgacgcaactcccaattcttcgagcttagcggcataaagcttgcctatctctcgcatttctacagggtcaatgaatccatcagccgcggcgcgttctatatcttttctaatgccgtcaatagccttgtggactaaagaagcttgatgtggagtagcgctcttgccggcgttgatggtaaaaccttccacaaaagttttaatagccttgtcagtttcccgcttctgttcctgttgaagccttttaagctcctgttttctctcccgttcgagtttcttttctgctttttgctcttcttttttatcatcatttttccattccttttccccaactctagattctttctttcgagcttgttcatttctcgcttcttccgtttcaagtcgtaaaattcctttttgaacaataacacgctctttcaaaataccatttaattcttcttggtgctttccggcctcctccacagctgttttttgtctggcttcaactttttcgagagaggttttatattctttggttctttgttcgtcggtaacaggcttcccgtccttgcctacaccataagaaggctgaaatgatataccttcttcctctagtctttcttgaatataagaaacatgatttactgaattattgagcgaattttgtgctggtttcctagcttctaaatatttccccttttctctctcaagttcttccatttcttttatcattttttcgggcgttggcaaaaaatcggggataccatttatagtctcttttactgaagaaagcttctttccaacttcttctattcttttatcccatgattgtacttccctttgcgcttcactctgtttcttaaaaatccccgccatttcctctacagttggaagagacatttttacattttgcaggcgtgaagcttcacctaaagctgtatttcttttcccttccgcatccccctgcttgtcagccaaggcaaggtcttcttcatgggccgtttgaatcctggcccgctccgttatcctttcaagctcctgatccagaagcaaaagcctgtactttctttcatgcttgccgattttcccgtcctggtactgttcttccacttccaaacgctgcatcttgtttttccaggtgtccgccccctgcttctcggcaatctccattttgcgtagggtgagctgatattcaatttcccgggtctgtttctcatattcataagtaatgtttttaatatgttgttcatactcccggttgatgacgtgggccgcttcttcctgtttcgttttctggacaagcgcaagacggcctttttcagcatccctcaaatactggttgatttcatcatgcttcctctttgccttctcggcggccttgtcaagttcatcactcttagccttgaaatggtcaatcagggcggtaatgccggcggtcagcccctggatcagcagcatagcccagcccaacggccccatcgccgttttgatggtggctccgaataaatgaatgaacgggatcgccccgcggagggcgctggacatgcccaggatgcgcgttgccgcaatggtgatttgcccggccagccccttgacctgcgtggaagtgagttgtccggcatccccggccgtcttgatgcgccgtcccaaatcctggatattcttcagggcgtccgcctgggctacgttgtccccggccttccgggcttcttccagtttggcaatgtaggattccagttcggcctgcagttcttcataggtggcggaggcgcggcggttgttggcttccagccgttccaccgtggcggcggcggcctgctgcttccgggcctccgcggcttccgccttttccgcggccttgtcggcggcatccatttccttgttgtagccgtcgatgatttgttgaaggttttcgtcaaggtcatctccccatttcgccccaaggtccaaatcagacattttgttattgaggacttcaaagacgtcatccacctgttccagcttcttcctgaattcctcggaggtcagcacggcgttggtgacttcatcaataaacccggtcaatcccgggttgtcgttgaaggcggctttcatccgggagccggcggcggtcagggcgtcggcgtattggtcaagtttggaattggcgttttccagggcttgttcatattccgtccccatgccgtccttcatggcggcgccggtttcttcagcggccgttttgacgttgttcagggcgtcggttacctggttgatggcgtccgcgcttccgccggcttcttgggcggcttccctggtcttgttgatggcttccgttgtctggtcggctccggaggtgtcggcggtcgttctgatgttgatgttcaagtctctgtctgacatggttttattgattgtttttatttggttggctgttgttgtttcaacgggtagttgaaagggggcatatccgtggttgccgaagcattcatggattcaaacgggcgtcgcacagggcgagcatgacttcccggcgggcgcttttgggaacgtggggaggcaggggattgccgacgctcaccacgtcatagctgcgggcatagtcctccggattcgccgtccggctgtcccagttccaccaggaccaccgcccggcccggttccggggcgtccacggctcgtcaagccggacacgctcccgtccgcagacgtccatgacggcccggcagatggttaggtcttccggggcgagcggggggatagcggcgcattccagagcttctgcggccatcctggccgtccggccgctcagggcgtagcaatttccgtaggcggaccgttcggacgggttccgggggacccggtatccggcggcgtgcagcgcaagaccgttatgctgcatatcgcggatccatccgcccgacagaagcgccgtgtcggagtcaatcttgacgacggtatcgccatccgccgcccccttggccagcgtggtaatgattccccggacgcactccgggccgcgcaggttgccgcagcgggggaaagagctccggcgataccgcgccccatacgctacaagagccctcctggcctccgggggtaccggggcggcgctgtcgtccaccaccgtaactaccgcctccggaagagccgtcctggcgcaccggacgcaggccacggcttcctgcgcgtctccggcataggtgaaggtgtatatcctgatcatgacattccggaggggccgaaggttcccgggtggattaggagataaaccgtgcccgcctggtgctgcaccaccttgttgccgtcgatggtggccagatggaaataatattcataaggggtttcccggtcttcctccgcgagcctgacggggtcggagacgccgcccgcggcggacagagaggatccgaggtatttcgcgtccttgtccagctggatcttgagccagatttccccggaggtgacggggcttttcacccagcccccggaaccgtccccctccggaagcagccccccgatatagttgccggcatagatagccttcccctggcggatgtaggcgtcggacaccttgccgtcgctcccgtaagacaggcggcattggaatcccacctcgacggcgctggttccccacgcgggaggctcctgggcctgcagcagttttacggacggcccgacgctgggaagctccgggacttcatcgtccgctccggaagagcctccgcctccgctgccggatcctccgcccgaagaaccgcccccggcggacgtggacgaatccgcccaggccgtccggcgcagcgcctcggcaagctgccggctccggtcgatggagtcctgcagggagatctgttccggggcccccaccgtcacgtcggaaactcccgttttaaggtcgagggatatttcctggatgacggaccgcatggcttcccattctttcaaccctcccgtgatggagaggcgccccccgcagacctggtcaaagtcgtcgtggacggtcgcggatccgtcatagggcaacgcgcgggtggcttcgtagtaggatttcaggaaatttttatacagtgcggaggtgtcgtagctgcccgatgtttcgtcgtctccggagcttccgccgtcgtcggacacactttccaccgtccctgccctgtccacccggtaggatgcgtagccgacattcgtcgtggtcacttcaaacgtcaatgttccgatccagcggtccccggttccggattttccgccgtattccggaaaatattgtttcaccgtgtcggggggatccgtcgcccgcacccgcaaatccacccggaccttgccccatttgattctcgcgctctttccgttgatctggccggaggtcagttcgtgggtgatggccgcgctgctgtatccccggtgttccgcgtcagccggcgtgatggacgtgattttcggactggccgccacttccaggccggcgcaatcctccagggccggagcccagcgtttgacgcgggccgcccactgggccgtgccggtcgggaatttgtctccccggacaatcatccgcggggcgtcgtaacccagcgagcccgtttccgcagggctgtattgcccggcagtgtcggagaccttgacgccgcccggaacgtccacttccgccgtcaccacatagagctgggacagggaggcgcctgagggatagacggccagcgcgcgctgaacccgggaaataacggaggcgttgcaggtcagccccacggccggaggcaccagatcgggacgcgccttgagggacagggcgcttacgtccacggcggacaggtcgagcacgacatccggcagggcggcatggtcggcaatgaccagcgtggcggagtcatccgcgccgtattcaaaccacgcggccatgttggggcgccattgctggatcttggaaagcagggaggcatacgtttccgacgcgtaggcaaacggaatgatttcggcatccttgtcgatccggaggtcgtatttgatagggaccagggccgtgctgacggcgtggtccaggactccggagagggcgtcccggatgttcgcggtcgcctgtttttcctgaccgcttccgcctgtgccctggcggtattcggcaaagatgccgttggcgcggccattcgcgaagtactggatgttgctcaggttccaccagtaatcgcaaatcctgatgtcccagctctcggaggttccttcaagggagtgttccaggtcgatggccggtccgatgagcagggttttcccgcgccagacgactttcactatttccccttcttcaaacgggcaggaggcaaaccgggagaccggcgcgcggaaggagacggaggctcccccgaaggagagccggttgtaggacgggctttcggccatgtccaggaagtcggcggaagatacgtcaagggttttcacagggggcggccgagggtgaagttgtaggagacaataaggcgcaggccctgaaccttcggctcggcatcggcgatgacggcttcaaagcgctgttcacggccgcaggcgtcggtccaggcccattcccccttccccgccgttttccattcgttgagccattcgtaaaaggcgctccacgcgtccatgtgggaggcgcattcccgcacggtggagatggtgaaggacagggacaggttgccgaatgcgtccagcctggggaacgggctgttgatgatcggcgtggcggacgtgccgaactgcaccgggaaagcgtgttccggcagggagtcaagcaggaattccccggcgcgcacgacggggcgcccgtcaaaggtgatggaaaagggagagacggtcgtgtccatgcctcaataatggtgggggaaacaggggccgcccctccccatgcaaacagaggggcggccccggctgtcacgctccggcggaggccgggaaggcgatttcttccgtgggcgtcagggaattcagggaggacgggatcacttcaagcgtcaatttcggcgtgatcagcttgttgttttccgtggggatttccaccttgagcagcgccgcgacttccaggaccatcatttcttttttgtcttcctggtatttggtgaggcgcgcccataccttttgcccgtagatgttccgggaaaagggctgcacttccttcccggcttccagcctgtcgcactggtaaatcacctgccagcagaccggattaacctccgtggagttaatctcgatggtgttgcccgtcactttggtgttcttccgcgtcacataggaggtcgtgtcgcgggaaaataccgtgcgggcgtcgtcttccgtggtcggcgtgattttgtagtcgatgacttcgttggccatcatccaggcgtcggagtccttcgccggcttgaaatgctcgtccaccgtgtccgtgccgctttcggccgtgactgtcgttccgaacgggcacaggtcgagaaaggtgccgaccagcatttccttgttgtagagttctgacatggttgttagcttcttacgtagtcaataaaggtcactttcccggcgtcggcgtggactttgtacacgtcttccgggatgtggacgatttttccccgcgcggcgatgccgtgagggagttccagcttgttgacggccacccggcatttgacgatgcggggcgccggagcagtagcggcctcctgggccgcggcggtggtgggtttagttgccatgtttgataatcagggttgtttccatcgtcaggacgatggactttttcaggattttggcgagagccggcttggagctggtaacgattacctccgtcatcatcagccgggcatggttgcggcgccacttgtgaaagccctcctggatgatgtcggcaaggtcgtcggcgtcccagccgtcaccgtccagaagcgggttgctctccacggtgacgtgccatctggccgtgcttttgccgctcctgctcaacttgtccggaacaatttccggacgctccatgacgatgacggtttccagggaaccggtcaccctcttgatttcttcctcaaaggaaccgtcccatgccttaataatgatttccgggtcttccccgttgttggccgcggagcaaatttccacggcccgctgacagaggacttccgcaaatgcaatgacaggcgacttcttcagggttttcttcatatcggattgctccaatcctggtgtttcggccctccgtaaatgacgtcgctgggctggtgcccctcgtagggggcaaactcgacttcacaggcagccacggcgcggagtttcgcgcgggcatcctgatattgagccgcccgcgccgtcccctgcagggattcgcttgaacctggcacggagctggtgacggcatcccgcaccagaatgcaggtggtgaataccaactccgcgggaacggaactggaatccatcgcaatcctggcatttctggggcaggagttgactgcagccgccacctcgttgcagacctcgcggatgatgtcgctgattttgtcccgggcaatggaagtaatttccttgtcctggcaatagcgggcaaccgcttccggagtaatccttacgagggccattgtttcaataaggttataccttgacggcaaggacggcttcctgtgccgtgctgtcgcctgcggacgtttcagctgcgattttcaggcgcagccaggggccggcctccaacggaacgcgcatgaacacttctccggagccggaaccattgctctcaccccccgtcgcaaccagcttcggggaatccagttccgtccaggcatcaccgtcctcggacgattcgacggtgagggtcatcgtcttgccggcggccagcgcgggaagctcttcgtgcttcaatgaaatgacagcgctgtcgatgcctcctttctgtccgatatgaatcggggcagacgttaccgtctttccggttcccggcatcttcagacggatcgtaagcgcttcgtcattgcggtacatattcttcatcatgtggtgtgtttctcctttctgcggataaaatgttaatttttgagggcaagggagttgcgacgggcgcggaaaaagtcttccgcaaatgcggcgcggacactggacagtgattcgtcatcaagcagggaatccacttccagaatcttgattcccatcacggaatcgggttcaggggcgatcatgcccgttccgccgtttccggtggcaggcgtaagggttctggattcctgcaacagcaatttcacattgccgttcataaccacataggaaatcatgccgcgcaaggccgcaggaaacaggctcttcgccttggcgacaagtttgtccgtcaagggatgctgggcgctgatgttcttgatgcgggccacggaaaacggagattccacggcaatgcccgtccagccttccaaacgggaagtataggccctcattgttcctgattccccgtcttccgtattcctggctacggtctcttcctgcaccggagacatggaaagcgtcttcttgttcccccatatggagtgcaggaagtcgtcacccaaaatgaccaggtaagcggaagctccggagttgtcggcgcggttggcttccgagtcttcctgcttggaaggatccgcggaaatggtcatataatcccccatctgttcagaaatagccgggaacacattttcctgttccggaagcctgtaccacatctgcagggcaatggaggccatggcacccaacgtaacgcttcgggtttccttggtgagcagctgcgcccccctggcggagctggtgacaacggccttgtccaccgcaataggtccgtcaatgtagtaacacttaacggttttattggtgtattcggtcgtcaggttcttggctccggcattggccggacgaaacccgaaacggggaatgccggtgggcatattgatttcgtactgcgttccgtcaataacggtaacgggaaacgcggttacttccggggatgcaagtccaacagaacggactgcgtcaagggccttgatagatcctgttccttcctgctgaagcacgtccagcaggatcataaattctttcgcgggcatattacttgttcaggttattgagttcggtttcaaaggagctgcgaagagccgcggttcccgtgacgggttcttttggggagccttccggcttgccggcattcacgtcatcgaatgcgggatttttcggcagggcgttcaactgcttgctggcggcaatatagtcttccgtcagggctcgttcccaaaaggtcttggatgcttcatccttcggggcgattttgcccgcagcaatggcatcggcaacgtcctggacggcgcgttccttcacctgcttcctggatgcggcaatttcttcctggcatttcgccagctccttcttgcttgcttccaattcgtcggagctggccttgcctttgtcctgcagggccttgatgcgctccaacacgatagcctcggcattttcagccttggcttcttcctcggtcaaaatgccgagggcaacgagtttagtgatgtccatgtctcggttggttgtatggttgtcttgctggtcgaggccctccttgggcttctcaaggtctctattgtcgcccggtttcccggggtcttcaacgtcgtcaaaatgggctacgtcgccctccattcggctggcggcaatgcgttcgatgtcgtcaaatgcggggtcattgaccaaggaacctacttctatggattccggcaacaggccgaggatttccccggttcccttgtcgcgccggaagcgggggctgtgatagccgtaattgccgccttccacgtccgttcttcccttctccgtccatccttccagttccaacacaacgcctttttcctcgttccacacaaaccgtcccggcttgtaagaggcgggccccatctcatgatcatagagcccgaccggtttgacgttgctggatagcttggcttccaggtcggcattgagccggggaacgcagtcggacgttacccgcaccacacacgttcccggctggccgttgagcgagcatttaatagtatgttctcctttgggggcccacaggatagccatgggagccttgccgtggttgccggctaccgtcgttatcagcgtactcatgcccccatgatgaggcacagtggaggtatggggcaatagacgcaaaatgggctacaaaatattcaagccgtaacgatcaggaataaaatcccggctggccgagaataatatcttgccacctcccaaagttttacgtaatattataatggtattgggagagaattgatttctcagtccctgctctattgaattaagaaaaaacactaattaaaaaagaaaggtacttaccatgaaaatgatttttttatgggccacatgtttagttgtcataaccggttgcaatgctcctcaagagaatcatgatcaaattgaaaacggtggaacaaaaatagaaaacaagtcggaaaattctaatttttacggcacttatgaaggaactcttcccgctgccgattgtgaaggtataaagacgacactgacattaaataaggataaaacttatatactgaggagcgaatatataggagaaggagaaaaaagcgcaactttcgaatcaaaaggtcattataatttgataaatggaaacttgattgaattatctctaacctcttctaatgaaaaatcttattataaaatacttgatggtagtaaattaatgttgtcagacaaagaaggatcaattaatcaaggaatcttatccgaacattatattttaaaaaagaaataaaactatttctataacaaatcttttttctactccgccgcagtttcccctctgcggcggtttattttacaccgtctttcagcttagctctcctagtcaatttatccagtcttcggaacctcccccgtcatcaagcatggcatccatgaagtgtttgaatgctatgcccgtaagttcttccatatccggaaaagcctccggccatggcgcaaagatctgcgacttcttgagcttatagacggccctgactccgccatgcccgtccgattcaaaaaggcagcccggctccaatccggagccggtcatgctgttgcgaaggttgaggatgcttttacgaagagtgaaaagtttgcggcccgtcatagaggcgtaagcgccagcgcgaacgccgtgcgcctccggaatgacgggaatggtcagcgcctgggcccgcttggccgtcaccgtgccgccgtagattttcaacaacagggattgtgcaaggtctagaggttcccccccgtttccctcccctgcctgcccggtgaggtagatgcgggcaccgtccgccgtcgtctcggcaaaccagtttcgggcaatgtcgttggcccacccggttttcttacgtccaggcccgtgggtcggcagggacgtgttttcaaagtgtccggattccgccttgttcctgtaccaggacgaaagccagcttttcactccctcccccatgcgttcattggctttcgccaaactttccggagctgctatttttttcacttctgcaattaccgggtcaacaccgttcaagtcgatcgtcaggttcatatctcgtcttcaatccgattgatttcccaccccttccggtaagcttccgcgctggcgtcccacagggcttcctgcagcaaatcatcattggtgaggtccatttccggaaggcgggcaagcacagcggccagttccgcccgaaattcatgatcagaaagcccggaacgggctttgccgatcaattcccggacaaaatcagcgcatggctcggcccacgcctgtaaaatttcttctgcggccttttccgcgtcctgctccaactcgacggccagggcgagcggagctagttttttccctcggaggcagcggcttcaatggcatccccgtattggcccggagcggaaccgatagacggggcttttctcaagacaggctcgccggaacgcggcttgggtatcttgacgatggtgcgggcgaattcttctcctacatccatgatttccgccgctttggcaaccgtttccagggcttctgcgtcaatgccgcggatagagggaacaaattgagggagacgggaaggaatatgcccgtaattcaagtggatgatggcaggaatgagttgggaattgagaatattcgccacggcctgccccgcgtcttcaatgacctctttgcggataccggcatgcactttgccaagggcatacgcccctccgtcccccttggaactggtcaacgtttgtcccaggatcaggttgtcgcattgttcgtccgccagtttgatcaaatccgcctggggcagcccgttggctccctttacggcgtcatgaagctgaaactccatattctgcgttgtgacggcccatcccccggaaccaaggttttgcagcatttccgccgcctccgtttttgctttttcgtcacccctgactttagccgtccggaaagggatgccgaaaagctcgcaaaacgtcatcagccagggcaacccgtaacaggcggctccgaaccatcccacaagacaccggagcttggcgccaaaaatagggtggaacacgtcggccttattcagcccaattaggaacttgtccgggggaaattcttctccttccaggtcgttttccaggccgttgcggaaaaggagcaaacgatccttcctgccgtagttatattcccatgcgtaaaattgagcggaaagaggctcgtaacagcgggggtagatgatatcatccgacgcccatttgatttgatgaacggtgttgccgcaagtaagcatataggtcagggatttgagcaaatcgtctgctccctgctctaccgtgtccggttccggttctgaccgccagaaggcggattcgacaagctccgccatttcctgcgcttccggggtcggttgctgtcctttttccgtccagggcatgactgtccattccatgcgggcaacggcgtttgctatttccccaagattcttccggagacgcggccatttttccagcatagccataaagagctgttcctgccggtccagccgcccggaagcaatggactctttcagagatttcagggattccgggtcaagttcggaggctggccagtgcttgaatttatgatcagcaaacggagaaaccaatatctggaccgcctctttcaccttgccgcgaagcctgggaaataatgccatgaacgaatagagatttaaggattaaacaagctcctgcgctatgctgaacgcatcgtcgcagcggttcagccagcccttcccgaacacaggaaactgcttgcaagagcggtaaaacgcctgacgcttctcctgcagggcgataaggaacaccgcttcacccgtggcggccagctggtcctgtagttcctgccgggtcttggggccgacaatcccgtccaccacaagcccggcgccgtgaatgttcagcgcgcgctgcaaaatcttcccggtattcctgctcccggaattgaaaaaatggtcacgcaacataaactccgtggccggaaaagcgtcggaacccagccaggaacgcacggcggcggtattatccaggacatactggagacaaccttcccaggcctcttcacgtcttccggcatccaacagggccttcaatctgttaaacacggtcggttcaataccgtcgcaaatgccgcaaatctcccacttgccgcccttgtcggcggcaggaaggcgggaaacgcgcagggaatccggcccggtgacgaggctgtcttcaaagcggaggatggccgcagccatctttctttctgtaggattcatattgtaaactattggctatgagataaagggaacttgtaagaaaaactttacagttggaattaatctcgctgtttaagctgttgctggtggtaattctccaaatgctggagacgagtatccatcgtccgcaggatctccgccgtatgggccgcgttggtagcctgttccttcaccacctcgcggaaatccaggtagatgaacacggctatcacaaaaccgccgaaagtgacgatctcacgcgtataatcgcggatcactcccagatattccttgaggggtttgcacatggtcttatttcttggaaggtacgatctgaacaacgggcggaacgtctgtaacaggctgggcctgggaataggagatatgtccctgctcaatgacgaggcaggagccgtctttgcatacctcggcgcggctcggcgtcacgtccacggaatgaccgcagccacccagcagagcggaagccgcataggcagcacctgctaggactacccacaaaaggcgttcccaccacttcaggccggttttagttttgcttttttcgtaggcatctttcatgccctgcttccccgcctcaagggcggcctgcttttgctcgtcacttaatttactcatggttttgctttgtgaagtatttaaaaaatgccacggctccagggtcggtaatgatgaactccgggtagtcataaaccgtaaatatcctgcggcctctggtctccgcatggacggcctcaacggtcaactccacggtttccaccgtccgcatcgggtcatccgattccggggcgtagaattctttcaaccgcgcccaaacctgcaccgcctgccacggttccgccagtccaaccaaagcggcaactacggcggccattgccggggcctgatccgccggtatctcgtccgctgtgtagcggtctgtccgggtgtaccctccagcgtcctcatagacggccgtcagggtgaattcctcccacttgccaggcttcggaaattgtagttgtatttctccgttgttcatgattcttcaaggggtacgttaatatcttcaaaagccgcggttgcttcggattcaacagcattggttcctatcgcgtccaacccgtagaaaaccgggttgatattccccggctgatagtaggcatattcgccgggcccggcgtaaaccaaagccgttccgctcgtcgtgttaatcacgtccgtcacccacctggaaacgccgactcccgtctcaaaattggagacgccgcggcaggtggcaattttgtacaagttgttggtttgcgctcccgtgaccatcagccatagtcctcccaggttttcataaacgctgctgttggcaaccgtcttttgctggtaaataatcttgcagaccgtccacggaatgggctcgttctgcgtcgcaggaataaagctggtcgtcgtcttgacctgccacccatccgtggaattgagtgcgtaaatctcacggacacgcaccgtatagccgttgcgggccgtgtctctcacattgtcaaaggtgatatccagaatctccccagaattaaaggccaggtcattccccggaatgatcgtgtaggaatccgtggtgaggtccgtcctgattgttttcgccccgcgcccgatgcccatcgtcaccttcgcggctgcagtggctctccagacaaacgaaaagccggcccatgaagaataattccattgggaagaggggccttcaaagggagcctgaatggttgtgtgagctcccgagggaatagcgatgcgggccatctgccagggaaccgttttagtaattgtcgccgtcccggtcttggacagggagtccgtattcaggaacgccacggcggtataaatattggccgcgcctcccattcctgcggcataaagccggttgacgccggattcgctggagggagcgcccacagccagcgggatattgacgccgccattggcgttgacggcgcttgaaaacgtggccgcccccgcgcagttgaagctggcgccctgggaaatattcaggatgccggattctaccatgaatgtccctcgcagccagccgcccgactggagatcaacggactgataaaaccgggtgattccgtaaatctggttcagggtcccggcgcttccgcttccgtccgggttattgacgaccagaggcccgttgatagtagccgccgtagcggtaatagtgccggacaacgtcatgttgccggatgcgtcaacctgcggcatggcctcaagagcctgctgggcttctgtggcggagttggccgcgctggtggcggatgttgcggcgttatcggcagccgtggatgccgtggcggcgttctggccagccgtccgcgccgcagcctcggcagtcgcggaagattgccgcacatccctccccaggctatccagttgccgcgcggtagccagttccatccctcccagggtgatgccgtcgtcatagtccaccaccacggtcatcagcggggccatcgtgccgttcacggtgggagggtttaccacttctgtgatcaaaccgcgtccggggacggacggagtaagcacggcgtgcatacccaaggcatagggcgtcatctcggtcccttcgcatacctggataatgatcttgtccccgcgttgcaacgtaacgcccggcgtaaatacccacgtggccgtctggccgctggacaggttggacacataggcggaggtgccgatcaggctgtaagcgccgtccgtcagccgccagacacgcaggcaatattgattcagggccgggtcggtgaaaaaatacacggttgaaatgcttttcagacggcagctgtcgggcagatgcccggccagaatctcgtctccccaggtcattgcatagcctccgacgatggtccaggtgtcggcggcgtccccgctggacaaggaggattgcccggttgccgcggccaattccacgcccgcctccttgagagctcccggcaatttatttgctacagcctcattgaccaattccccgctttccacctgttcttccagcgtttccacaagctgctctgcttcatcccgggccgcttcggcctgtcgtacaagttcctcgaccacaatggacgggttttccacaatggtcacggagccgtcttccgtttcggggatggagacatcaagagcaccggccacggccgcggcctcattcgttccgtccggaggcgtaacgcgggacattacatgcacggctcccttcaacaaggggtattctttgcccgatgcgtcggtcagaaaaatatcatatgcgccgcatccggcggccagcctcggccatgtcaccaatgccgtactcacccccgtaacggcacagtccagcatgatcaccccatcctgtaccaccgcgccgcgtagcgtcatgccgctgatgtccatatcctcaccggaaggagaaataaaatgcagcgcaagagactgcggcagggattccgtggcgtgtacgttgtagttggcggcttgcctcatgcacgcattatcgccccaacgtgagggagggtacaacaatgtcaaaatgggctacgaacagtcctaaatgggataaaatttccccgtatgtttgacggcgtgctgactcttgcccacaataggcctgttgccctctcctgtccaaactccggaagatccacgaaaggaagcccatatagcccccagcaaggcgtccgcgcgatcaggagaagacaggttgcgagccttcattttctccttcttctcgttcctgagcctggaatcgtccgcatattctttcttccgggtagtcaactgcacgaaaagcgtcttgtccggccgcctggacctgatatgcactcgcccggtcatgagttccagtccggcgtcattccagcattccgccgagagattgatgtagcggtcgcggtcttccggagggttgttcccaaagaactcattcggataccaacctgattcattaaaatcgctgatgacagccaggcccatgcccggagcgtccacccacaaatcacaatccgcaatgcccagccccttgagggtggcaatgcacttgcggacactctgcaccgtgtcccgctgtcgttccgcgtattcaatccaggcttcgtttccgtcgcagatggcaaggactgtttcatccccgcccgcggcaatgtccaggaaggccacggggcgccccctgcgcggctcgtagggctgccgctgaccccattccagttttccagggtcaatgatgtacaaatctccttccagcgtgaattccgccagcacgacggaacggaaataggaatcatcctcattaccccccacacgggccagaatgcggtcaatgcgctcctgggagatatgggggcaatcaaaggccgttaccaccatcggacagaagaggtctttttcctcgtggaaacagcgataaaattgcccttccggcttgcctggggatgaaaggtagatgcagaattgaagcgtacatcgttcaatggcgtcaaagatttcatcaggaaccgtctttgcctcgtccaccacgaaaaacacgggggaggaaggatcatctccggtaaactcgtcaacgtcaaacagacgggctttcttctcgctgcgggggtcttcctcatcctgttccttccgctcatccttgaattcgtccgtcacacgcccgtgccagccttccgccttcccggcgtggttggtggaaaagccttcgatgaatcccccttccggcgtttccacgcggcaattcttgagccatttccagcccgcaagggatgggttgttccggtgccgttccagggcaggccagagctggttttttacctggcgccatgagccggacgtaataggcatacgcccacgggggtagcgccagagaaaccatagggcaaggataccaattaccttgtccgtcttgccggaaccattagcagcgcgcagggcaacccgctttccccgggcagccctttcaagggcccgcatctgccatttgtacagccctgtttcccccagaatcagggcggcaaagatgacgggagagtcttccggcctgaccggagcccctagctttcttcctcttcggaccatatttctctcaaggctgtcactaacggaacgattgcttctgctggaagtttatgggtcacctctacgtttttttctccaccttccagagccaacgccgcacggtctccgtacttcttcggcatcagcttggcaagcatccatttgagtgtgtctatttccaacttgaccgcctgcaacatggttccccctatttcggcacgtggggccacttcatgccctttctccacaaggtcaagcaacttgtcttctagggcggcaagccgttcctcgcacgcgcgcgcgtattggtttgcaaaatccgcgttctctctggcccaattcatcaccgtgggatggggaatgccttccttttcggcagccttcctcagactatccccgcaacgtatatgaccgcaaatgcgttcagagagggcagcgctatacctggaaacatttcccttcttcccggtcctctctttcttcatttcgcatactccttgttgattttttcccaccctgccgggggtatatcgtcctggcggggaacgtacgcctttccggagagtttcacatatccttcaatccagcgcagcccttccgcgtcagcacagcgttcaaagctggggcagtccgcgttatcgtagaggatgctatcaggtttacgctcataagcgctacattccatactacccgggttgagcttcttcttggagcacaaaaggcatttcatcaggagagggtgggatgttttgcatcctttgaaatcagactcccaaattctcttgtacgctggtgatgtttcttctttcattttcctgacgccttgtattctgtaggcggaaaatatacccggtcaggcaacatcattagacgttcttctaacgatgtaattttttcaatttctttccaaagctcaatgtattccgctgatttttccgtatatccacggtctttcatttcttcaataaattcttcttcggtcatcttcttatctttttcccataactcaagttcttctctcgctacttcttccgtatatccacggtctttcatttcttcaataaattcttcttcggtcattttctgaacttctttctatattctttttcaatgagttcaccaatagcctttgcaaagtcacgaggttgaggattgtttctatactctgcccatgcttcggcaatggtttcttttttatttatactatcattcttgttgtttactgcatattggcttaaagtttcacgggttacatgtttgccgtgaattcctttagtatagatttccatgaattcgacattgttagatattttcaataaataatctaattggtgccccaattcatgatcaaatatagatttaacaccatcacagccaatcggataccatttttcttcaacggcacgttttaacattgacgagagcgacaaaagattcgcgccgtatttttgatttatggcgattccgctcatcgtctcatttttaaaaacctctctatggtcaaaagcgtgtgcaacctcgccggaggtcttgaaataccgtatcacgtcctttttaatacgatcatctatgcgcttatccccgtacacgctgcggagcggttgatagcgctcttcataatattcccgcacaatgtcccctaaaaactccttttttttctgagcggaaccccaataatgaatgttgtttttaagttcagggaaatcgcggaaatgctcatgcagtgattcattcatgccgttggcaacctccaaatcaattcctttaaagctaacattttccacgcctgcatcaataacaaattgttccgcctctttgatgcttccagcaggtttgaaaatattctccgccgtttccctggcctttttcgccacttcctgtgagggaaagacaacctcatcagatttgtcctgtttgactccccagcggtcttcatagacctttttcaatttggccttcagttcctccggcaacttcgccgtactggccttcttgccgtacccgtaccgttcaatcaggtcaatcccgaagcgctccgcaccccttggacgcttcaacggctccccgggtttgagtagtcccagccgttcgcattcttcccgggaaacaggctcctgatccatgtaggagttgaagccgaacggcggccaggggacctcaaagcccccgaggctggcggcgttcatttcgtctgcccaaaaagtaaagtcggttttaagccggacagcatcttcgttgacgacatgaacaagccgctttgtcttggctcccggaaagcggatgaaccggaaagcaggccatgctttgagattggctggtttcatggatgcctcccattgagcagccccaatgctttgccggacgttggtcttgaaaatgagcttcagacgggccagagcaccgatgtttttaatatcgttgtgatacttcgggccttcggcgtccggaggaacaagcccctcggtttggagccattgaagtgcctggttggaaaagtccgcggcgcttcctaccttgataaccgtttccccattgggtaaagtctccttttctcctgtcagataattcttaatcaacctgtgcagccgttccagcaatctgatattctccaccttggaagagaaaaacttgttttcgttcatggcagcgttcagagcagcccattcctttgaatccatgccggagggtgtgggatgttttgccaggaatttttccaggggtgttaccatagaggcaattctggatgttcaaaggggggaggttcaatcttgccaaattgggctacgtgatgttccagaatgcggacggcgggaagacggtagagtccggcggattccagagcattgataatgctgttggcgcgttcttcggcttcctgtctgtcgttagtaccaagtcccagctcgacaagtttgcctttctttctgggatccaccagaagcgttaagcgcagtttgtaggatccgggctttcctcgccgcgtcggcttgttttttcgcagggatggtttggggggtctcatttgttggtgacgggataattctgttcttcctcgtattttgtgagttccgcggtccagcggaattgaatacgccccagccgtccgaagcggtttttgccgatgatccactgcgcttccgtggggtcgtgcttgtcgggcttgtacatgtaggggcggtggatcatgatgatctggtcggcgtcctgctcaatggagccggagtcgcgcaggtcggaaacgaccggtttgccctgggcgttcccggctcttttttccacgtcgcggttgagctgggccagcaccaggacgggaatattgagttccttggccagggatttgaggccggcggagatttccgagacttctcgttcacggctgttgcccgggcctgccgggacgtggaacgcatgagctgcaggtagtccacgccgatgcatttgacgccgtgttcccggaccatccggcggccccgggctctgatgctgtcgatggtgagggagctttcgtcgtcgatgtgcagcggggcggccgtgattttcctgacggcggccgtgaaatgctgctgctgtccgaccgtcatcggcttgccgcggcggatgtcgtcggagttgatgccggccatgccgtagaggatgcgttccaggagctgggatttcggcatttccaggctgaacatgcccacgggggttccctcaaggcagatgttggtgaggatgttgaccagggcggcggttttcccgactccgggccgggcggcaagcacgatcatggcgccgggctgcaggccgtccagggtcaggtccaggcggcggtatccggaggagattcctttgatagctccggggttgttcatgcgccattgcaggttttcaatgatggttcccacggctccgcggatggtttcggtctggcggacgccgcaccggtcccgcagggcggacatgccgcgctcggcttcatcaagggcttcttccgcgcttttgagctgatcgccggcagcttccgccagccgggaggcaaacgcgagcagcgcatgttttttggcagcttccgtgaccatttccagcgcggcggcagttttgtaccgggcaagggctccgtaggtggccgtttccacgactccggcgtgcccgcccacggcgtcaagctggccctgggcttcaaggcgggcgatgacggtgagagcgtccacggttcctcccgtgccggcgacggtttccagagcggtccagatttgctggtgcgccgggaggctgaatgtctggcggctgatgcccttgtcccggaggtccgcaaaggcctgggagccgtccattgcctgggagagtaccagtttttcggcgtcgatgagtgtctgagagtcgatcatgttgttgaagttgttgattgttaaagttcttcaaggttgctgtaagggtctttgtctccgttcccagggggcggcggatggttgacggcgtaggaggtggcgaagctgatggcgtcggattgccatttggtcacggggatgccgctgcgggtccagttgacggcgtcccggcttccccagtaggccgtggcgcaatccggtatctggtcgggggttaaacgcacacgccccgcaaaggccgcggcccgaagatggtcttcgacttcttccacggtgcacggagagggggtaagggggtgaattccttcctttcttccttccttccttacggtttttgctgggttttcttctgggttttcaaaaataaccggctgggtttttgctgggttttcggaaaaaaccgactgggtttcttctgggtttttagaaataaccgatattggtttttcgtgggtttccttttcggttcctacactggttccaatgtcggttttcctgggtctccccccaagtttcccattttcacgggcggtcttccgacgcgtttgcacgctgtcctgaatttcatgcggatagccgaatacgacgagattgtcgccgtcaaagtggtagagttcgttttccgcgctgatttcctggtcagtcacgccgcaggtctgcatccagcggcgcatgccccaggagcggcagccctcaatgatgccgccgttttcctgttcgcagcaccaggccagcagagagatccaggtggcgcgctgtatgggttccgccccgatatattcggggctggaaaacaaggctgttgggatattgatgaattccataatcaaaaaagcgtcagttgggggttgtagttcataaccatttaataatgcattctctacggtggtttttaatccaatgaaaccaagcgtatgcaatggctccgccttcggttttggaaaaatccccgttcttggcacaggtccggcgttcggaaaacacccacacgtccgcgggcggcgctacgtcatatagacggcgccaggctttgccctctaaaaactggaggcgcaaaagcatccagacattggctccgtcattgacgcaggcaagcgcacgctcaacaaattcgagggccgtggcataggggggattggtcataatgtccacgtcacccataggtgcgtcggcaaactcccaaagaaaatctagcacgctggaatcaggacatccccggtcaacaatatcggttgcgtacacttcatgcccccgctccctcagtacattgacgatatgaccagctccgcaggctggttcccatacccgctgacggagaggcgcgccagcgttgagcagctccctcaccatgtccgggtgcgtggcgtaatagtcttccctcggcctttcaccggtggcgagataggatgctcccagcgtagcgccaagcgtccttttattccctgtccagtctttcataagacctcctttccacgttggaatctaccgagaagagcccggaatgcagttgccgccactgcaggaacttgcccgttgccaagggctttaagctcgtccacttctggggccaccccatcatcagggcgacgaaaaacgccgacacgcacatccccctgacgcgcttccctccactcctgacatagagatatgccaggtaatcttccaggttgcatttgtgattgccttgttccgcgcggctccaagctatgccgtgcgtgcctatgcaggcccgcggcgtgggcaagaagccataatctggagcggtgatggggtaatccaacggcgtcagctcccagcacaagccattccgcatcgtacccgatttcggcaaggtcaccgaggactctggcaagtcctcgtcccacaagcaaaggtgagttttccaggaatgcgaattccggtcgtacttcattgataattcggtgcatttcccgtcagaggccggagcgggcgccgtcaatgccggcaccttttcctgcggctgaaatgtcctggcacgggaagcctccagataccacgtcaacaaggccgcgccacggtcgtccgtcaaaggtgcgtacgtcatcccaaaccgggaaagtcgggagtagtccgtcattctgtcgggcgagcagtacgcttgcggaccagggttcgagctcgacggcgcagacggtgcggaatccgagcagctcgcttccaagtattcctccaccagcgcccgcgaaaagatgtagctcattcactccccctcctttctaaaattgctgcctgttccggggtaagatactgccagctctgcggcggacgggtcaggccaatggcagagagtggtacagcatgagggagccgcacgggatcctgaacgccccaggcaaagcaagggagataggtacgcaggtgagttttagagacgcaagcatctttgatgaataatccaagaactttcccgaatggcatgtgggttatgagcgcaaaggaaaccatccggcatttgccaatgattgcccgctctccatccttgccggattcataaagccacagcgtgacgtgttctcgtttcatgacacggggcacattttgacgtagttcccacgtcttttcgccggacagaatttttcccacagaaaggccgcctgacggataggaggatgttaatcattgctggcctccttcctgttaagctcccatggccatttaagcacgtcgtccgggcggcatgagcctttatctgtcctgatccaggcatcattcacatcaacgtccgtaagtgtagcccagtactgatacttaagagacctgtctataaaatgtaacttatcaccaacctgcaccctcatgatgggaggaaacaaagaaacaagcctatccatatcttcaatacatgccttcttggttttccaaaaatgggaactctggaagaagcagttgtagcaaccagcaacccaatcggttgttatcccatgggcatcatatcctcgtatggctttcaaaggtgtgccgcaaagagggcatttaggcgttttcatcggggtccttcctcaatcaaggctttaagttcatcagaacaacggaggcgtgaagcatttttcactgtgcaaataaggtgctgcgcccaccgggcatgccgtttcgtggggtactccatgcgatagcgggcgataattcctttgtggtgtacaatcgcggcctgaacttcgtatttcccgtcgtcggttttcttcatggggcaaacctgctgaacgatgatgtgaggattccgtttcattgctctgatccttcttgcacagtgattgttatttgtggttcttcgccccaccatttatccacggacgcggaatacacctgggcgtcatcctcccaaaatctcaaccgggtcaggacatcctgcagggttttggccaggttgtcccagtccggtttggtcgttttcggaatgagcccgatccggttttttttcggctcgctcttgcggtagggccagacgaaggccagcttcagggagaccggccccgtcaggggccgggccggttgataaggtttcagcagggtcaggtaatcgctgatgaccagtttcaattctttcgtgtccgccagtttggcgtgtttcccgatgttgacgatttttttgttctggtgcgttttcgtcgggggaacaatcggcagcatgatggttatcggcttgttcatggctgttgattagaaggggatttcgtcttcttccgccggcggtcccgccgtggcgctcatgtggttgttggccggcaggtccgccgggcgcggaggcaggggcgctccgccgcgccccgccgctgtcctgtcctgcgccgccatgatggcccgggcttcgtccggccccagcacgtcttcgcagttgctgaattcgggataagtcccgtctgccctgggcttgtctccctgtctgacgttgagccggacgtagcagggtttgccgaggtattccgccgggttgatgatgacctgctggccgggttggtagacgttcccggtaacgtttttgacgaacaggtcaattttccaggccaggtctttcgagttggtcaggtagtaacggaccgtcgccgccccttcagggccgaaggctctgatgtggacggccagctgcgggcatccccgcgttttggcgccctgggagattccttcttccattttgacgatttttccttcgtagacgcccgcggggaggaatccgtattcgctgggctcgccttctgatatgtaactgaacataatggttatttggtggttgcggttttggagacggagatttttttgacgtaggaggagccggcccccgtcctgaccagttcttccgggaattgttgttccggcaatgcttccgcgaacagggcgcggaagacgtccgccttgagcgggccataggatttcaggagtttcgggacgccaatccaggtggcgtatttggcgacgtcttccggagcgacggtgtccgtgcctttccgggagacgcgcctgaatccggggacttccgttccgttgttgaggtagtcgaggattttttcttttccttttttgacgtaactttccagcacagccgccttggtgacgaattccgccagcctggatgggttttccgcgatttcggcgaagctttcttccagcgttccggcttccgccagggtcagcatttcctgcgccgcccggttccgcagcgggcaggtgtcctgcgaggcgcaccagccgcagtagtcgcagaggcgcggcccgccgccgcggtccacggcgtccaccacgccgttgacgatggagatggcttcccggtaggtgaatttccgggtgacgatttgctgctggtcgcagtagaggaggtggcaggtgatttcatccaggaattcccgttccatgaaggatttcgcgtaagaggcctgctgttcccagtagttgcggatttggccgcttttgaggtcgaagagtttgcccagcgcgggacagaggcagtccgcttccccgcctgtcacgcgggggtgccattgcgggaaggcgcagcggtttttgtcggcaatgacctcttcgccggagcagagcgttcggaccgttttcaccgcccagaggatggattctttttcatcggctttcaggtgttcacacgccctgaattcgtccactcccatgagcagggaccggaaggcgtcgtccatgcgggttccccgccgggccgcttcccccgcgtcaggggaggagacatagcaggggcattgcgccagcttggggagcagggacggcctcaatagttccgtggccggggccggacggggcccggcaatgtcagcgaggattttttgcaggtcgtccaggctgacggcgtattccgctccgtccagggagaggacggcatgcccggttttgcgggcgacgttgatgcaggtgacgggtttcattgggcggcaggggtgttgtattgcagaacggccgtgttgaaccggtcgggggcggagaggatgaaggaggcgaatttttccgagacggcttcaaggccctgccccggctggatttcctttttgtacgcgaggaagttcagcgctcccggcacgtcgttgatgaccgcggccagttggtccgccagggagggagccggtttttcctgctgtgcgggaggcggcgcctgcttttcgccggccggagcgttcccggaaggtccgcagccctctccaaacagcaggcgtgagatttccccggcgtccatcgccatcaccgcgggcatcccgtgccggtttttggcttcccaggtggcccggtgctccgtgtagacggcacgcagttccccgcctttggccttgcctccgtccgtgaaggtggtcacgtagttgcagaacaggatggcgtccccccattccttgagtttttccttggcggtgatggcctgtttggccggagcgttgattttgatggtgtacatggtgtaggcttccccttccggagggttcaccgtttccacgcggcaatggcagatgacggcgatgtgcagccctgcgctccggcagttgtcaaagacggaaagcaggttgacgaacatttcgctggcctgggcgtacccttttccatagccgatgctttcaatggaggagatttttccgtctttgggggaggcgttgtagtccctgatgacctggcgggcgcacatgtcccacaggcggtctcccgtgtcgatgacgagcgttttgtaagggaggtttccgttccgggcttccttgtagatgtcctgcagggcttccagcatggcgccgtagtggtctacctggatgcggtccacattcatgtgctgggttccttcttccgtgtccaggaagaggggggcgggcaacccggccgccagcgtggattttcccacgccttccggcccgtagatgatgacacgctgcggacgctgctgcactccgcgcttgatgttttgtaataggctcatattatttccttgtttgattgtattcaggtcgggcgtcagttcctgctggccccggcctttttgtttatgggtagttggaaggggttaacggattctggcaaccgaacggggcgcgatatttctgtagtagtcctctataaattcggagaggtaaaagcggggacgaataagcccacaaacaacgtgtttgcgtattttcccggcggcaatccacttcgccgcatttgtcgggtgaatgggtttttcaccagttttttcacgggcagccttgcatacttgagcaagggacatggtcggttcatactgttgttctttcattatagaaatgcattaatgatgaaataaatgatcgtgaaaatcccaaccagcagagcggaaaagacaaggttctgtacgataccgggccggggggtgaggtcattttccggcaggtctatcgggcagccgtacagggattccattttctcggcgcggtcgcggcgcaaccagtattgttcgttcgtcatttttttcattgttgttcagggggcgggttacagttcgtgccagccgagccggataaattcgtcaatcagggcttcttccattaggctgccggcttcttggggtcggagttcttttcattagcacacaacaaccttcggcagccttttgatggcctcaattaatcccggcctcggtgtccgcgtccccttgcaaatctggcggatcgtttggtctgacacctcaatcccttctctcactagcaaagccctagtgacggaggaataattgtagcctttgtcgtaaaggtactgccgggttaacacaaacccggtatcattatcggtttcctgttgagtcttactcataatatgatatgttgctactgttacacatgcggtggttttaacgtcctttgtcggatgtcaaataccggctacaggaaaacaaatacaacaaaaccgaacgaatgcaacaagaaattattgcaaacccaatatttatttctcgaacgtatgaattgttgaaaacaacaggtcttagtcagaatgagttaggtagaatgacaaatatatctcaagctactatctccagctatttgaaagggagaaccgcccccaaatccggagaattaagccgtctcgctgacttcttcggtgtctctatggattacctttgggggcgttcggaaagccaaacaccatgccaatcatccgtgccagtcagctcttctgaatggcaagacagagctctgctagcagaaaaaaaactagctcaactcaaatccctccttaacggcctaggcggagacatccagactctgggcaatactgtcaacaaactcgttaactttatcgctgaataaaatgggatcaccaacaatatactctattgtaagtattgtgatagcaatatcaagtgttatcgtttcgattgttaatctttgtactattaaaaactttaaacgtagagacgaacgttctgaactggatagggatttagaacatatattaaatatagccgtccaatatccataccttgaacaacagtattttaccaaggcatggactcctgaaaaagtttcaactgatgaaaaatatgcaagatatgatatattttgcaacagagtatataactttttacacaaaacatatgaacactttgacaaagacaaatccaaaatagaagattttgtggacataaaatcatggattcgattgcatcaatacaactggaaaaatcctgttgatccaaatgaaaatattgatggatatgattcggatttcagagatttcattaataaatacattaaataaaaacaatgagaaaacacatactaatcataggaaataacaacggattgccaggagtaaatatcgattgcgaaaattatcgtaaattctttatgagctatattggaggatgttggcatgaagacgaaataacaacgctaaataacaccactacagatcatcttaatagattcttaaataaattcaaaaaagaaaaattagattattttattactatattttcaggtcatggcggttcatataaaatgagaacagttcttgaattaagtgaaaataatgatgtcgatgaaagggtttttaatgacatttcaaatagacaactttccatctttgattgttgccgttctatcatttctgaagaaatagatatgattaaagcctctcgtgccactcttttggctaatcgtaaggaaaatttcgttgaagttattagaaaaaaatatgatgaaaagattatgtcttcattagaatatcatacaaagctatatgcatgcgcatggagggagaccagttccgacaccagtgaaggaggagcatactcatcttgcctgcttagggctgccaaaaatataacagaggaatacaaaacagttggaacagcacatattgaagcgcgaaatgatgtaaagaagcttggattcgaacaaaatccagaggcaattcttcctagatgtctttcatcacaacaacttattcttagtataaatccttacttcataacccgatactaaaaacactaatacaacagaactagatccttctgtattttcttcacagcatctgtaaaaatacggacgagttctccgcagtgcacgtggaaaccttggaacgctgggagaaggcatgacaaacgcccgcttgacaaatccggaagaaagggcatagtagggatgtaccaattcactaggaatcatgtcattcctttctaacaatcggccccggctgcggtaacagccggggcctttttgtcagctgaacagaactatcagaagttcaatcagccgttgtaccatttcaccgtacttgatcaagtcattgttaattcctttctactacgaatgaactcatttccatccgctccggatcaaccggcagaggcaatatacagaaaaacaggatttttgcaagatatttttatctgtaattttttgacgctcaaaagattatatactttatacctcataaacggcggcaaaatctccggcatctatgtggaaacgctggacaggtgggagaaagcttgacgcaccgggtaaatgtgctataggtaaatcctcttttttattttccgttagccgtccacgttgggaaacgcgggcggtttttgttgccatcctacttcttgaggcatcggagggctgggtaaccacaaacatacgaagagaggtttccagcccacatccttctgacggacagccagacaaacacggcgcaaagagtccaggtagaacagggaggggaaagaatagacgttcatgacggagcacataagctaagagaaaaacaaagaggtcagatcagaacataacaccataacatgttaagcgtggtgactcgtactataaaactgagtagaacaattccaacagcgcgacgggattgattacaaagccaaaaggaactgatgagaaaatcgcttgtaaccccgccaacgtctaggtatattgttttcactcctaaattttttgtttatgacacttcctctgctataccatttcttccaagatgaagagattccatcatctcctgtacaaagtagagatgaaaattctgatattaagttagacaaggctgatatacaaaaaattgctaaagaatctaataatagctattttttaaaatatgcgcagataaacattataaacaaaaaagaagaaatattagaagaatgttatatggatgattctaataaaattgaaaaatctgataaataattattcatatattgatattttaataatatgagtgagagtattcggtatgatagatcattttttgagagactgaaaagagagtcacaatgctatgattttcaaatattgacgcaattactaaataaattgcaccaattgacatcgtgcgatgtacttctatatgcggcttcttatataacagaaaatccttctcgccgagaggcagaaaaagttgttgtttctgatcaggatattcccaagatgacaacagtgatggagaaaatgggaaataacgatttattgtttattattcatagccctggcggaagtggtgatgccgctgctcaaatcattgaatatatcagaaagaaatatgcggaaaagaaaataactgctgttgttccccataaggctatgtctgcggcaactatgatgtgtatgggatgcgacaatatcatactttccaaattggcttcgttggggcctatcgatccgcaatttgctggcggaattccggcaagtactattttagctgagaaagaagaagctcttcgtgatatcgaaaacaatcaatcggcagctcttttttggaacaagaagcttgaaggtttacctcctggtatttatcaaatttgccgagatgcaatgtcttattctcaagaagtagtacaaaattggctgactacatatatgtttcatgataatgaaaataaagagtccttggcacaaaatctttctgaatggctggctaatggagcagaacataaatctcatgggagaccattcacttatgaaattttaaagaaaaaaggatttttagtagaagaattggaagaaaatcaagaaatgcaaaatctcgttatgggaatattccattcttttagagcagtattcgaaaataaaaatcttaataagctgtggaccaatcatttaggcaatattgaatattcatagtatttttttcttatttatcttttctcctcgcactgatactaaacaggaaaggattctttttatattctcgatcagcttccaaacagtattactacactaagagaaataaactagtgctcatctggtaaaatctcccaatatacaggtacatcttcaggattacaggctgtcaggtaatatttaatcgtcgtcttgctggtggtgtgacccatattttccagtagtccgtgcgtatcccgatgggcggccagccagtaagaggcgtaggaatgacggcaaacatcgtttaaatggctgatgccggctctccgacgtaccgcctgccatttgcgctgccagttcttcggagagagctttcctgtgcgtttttcttccggcacggtttccagccatgcctttaggttcggctctatttgcaccagacgtacagagttggttttactgacttccggttcaactctgatatagccatgagccaacttaacatgttcccacgtcagcgcggtaacttcctcaggccggacaccagcaaaaagcaaaacggctactgctattttcatatccaccgcgtttacgcgtagattttccggcatctctccgtctcctgaataatcccgacaagcggccagcagggaatgtgcctgcgcgggcgtaagaatggaaataggcgccctctggtgcttgcgttgtttgattccttcagcgggtgattgaacagcatattttttgctgatggcccacgtaaaaaacggcttaatgtggcgcaacgcggaattgtatgaaggcggcgtcgttttccatccggacagccatttttcaaattcatccggcgtcacgtcgtcaatcaggcaatccccaaatacagaggcaaaagcacctaaaacctgttttacacggctccggtaatgagaagaggcatcttgcaacgtatcacggtaaagaggctcaagaatagatattttgcgtgcatcactggcccgatgccgtgcgatgtaatagtcaataacatccttaagcgtcacgttgaacggtgctaaacgggcaagttcttcgatgatggcatcatattctgatcttgtcatcaacgtttcccccaaatgcaaccctgcagcaacgtcttccaggttggagatatatcccattgcttccgctttggtcggaaaatattttgtttctctctttccggatccggaaagtttggccggaatacgaacctgccagcgcccgctttgagtatgtttcaccggagttattttcaggcgtttcataacgtctcacagtacgccaattttacgccagaacggaatcaaaaaatgatattttgttatcatttgtggctgttttttcatggtttttcaccttcccagcctcaaaacagacaaaaaagaagccctgtaatccattaaaattacagggcttagaaaattagtggctcccccggttgggctcgaaccaacgacctagtgattaacagtcacccgctctaccgctgagctacaggggagtttgcattccatggaacgcggagggatttttactggaggtacgggcgtttggcaagtacttttttactcttgcaggctttttgacgcaaaaaggcttccgcggcgcagtcatggcaacggtgttttcttgacctttgaagggagaatgaccagactttcagcgacatgagtgaacatcaccatcatattgctgttttggccggcgacggcatcgggcccgaggtcatggcacaggctctgaaggttctggatgccgtaagcggcaagtttggctttaccgtaagccgcaaggaggcatttgtagggggtgcgggcattgaccactgcggcaaggctcttcccgaagaaaccattcgcgcctgcgaagaggcggacgccgttctgttcggctccgtgggcggtcccaaatgggagcatctccccgccaatgaacaaccggaacgcggagccctgctgcctctgagaaaacatttcggcttgtatgccaacctgcgtccgggcgtatgccttccggccttgacccatgcctcccccatcaagaatgaactgattgaaggcggattcgatattttatgcgtccgggaattgactggcggcctgtattttggccagccccgttttcgcgaacgggagggagacgacgaagtcgtcgtggataccatgcgctaccataaaagcgagatggtgcgcatcgccaaagtggcgttcgaggctgcgcgcggccgccgcaagcgcgtcaccagcgtggacaaagccaatgtgctgaccaattccctgctgtggcgcgagacaatgattgaagtttccaaggattatcccgacgtggaattgctgcatatgtacgtggacaatgcagccatgcagctggtgcgcaatccccgccagttcgacgtgctggtgacggaaaacctgttcggggacattctttccgatgaaatggccatgatttgcggttccctgggcatgctgcccagcgccagcctgtgccagggcgcacaggacaacggcctgttcttcggcctttacgaaccctccggaggctccgctccggatatcgccggcaagggcattgcaaacccgatcgcccagattctttccctttccatgctgttgcgctactccctgggagaaaaaacagcggcagacgccattgactccgccgttcgccgcgtgattgaccagggctgccgcacgggcgacctggctacgggagctcccggagaaatccgcgtgaatacggcggaaatgggtgatgccatcatcgccgccctgtaagcagagccgttcttccggcgccgcaggggaagggacacctgcagcacgcctttcctccggggggagcggtaccgcctcccctccgctttcctctttcatttccgggattttccggttctttatctatctatcatgaacatccttatcatcggccagggaattgccggaagttgtctggcgtgggaattgaaacgccgcggcgcggagtttacggttgcagaccgccccgtagcggaaacggcctcccgggtggcggccggattggtaaaccccctgacgggccgcgccttccgccccggatggaggcaggaagaatgcctggcggcggcagaggccttttacccggagacggaacgggaattaggcgggtcctggtggcagaaaactccgattttccgggaagtggagacggaggaccagtttgaaatctggcaggaacgccagacggctccggaatcctgcgcctatgccggacctctttttccatggccggaacactgggaaggccgcgggaaagccgcctatacgcgaggttccgccgtgctgcacgtggaaaacatggtcactgccatgcggcgtttttttatggaacagggccgttttgtggaagcggatgtatcccccgcagatatccggccgaatgcagacggtcttttccattggaacggtcgcacgttttcccacatagtctggtgtaccggctgggaagccgggcttcatccggacatgtctccgctgaaggggcgcccctccaaaggaaccattctggacttggacttgaaagagctggactggcatgccggcatcctgcatttcggacactggctggttcataacggttctttctggcgcttcggggccacctacgcgtgggtgtgggatgctcccggcattccggaagcccccgccgtccaggaattgatgctggaccttgttaaacgctattccgggaacatggacgtcatccgcgcccgtgccgccgtccgccccatcatccgccgcagccagccggtcgccggtcccattcccgggctggacggtcagttcgtcttctccgggctgggcagcaagggggtgaccacttccccctggtccgccgcccagcttgccggacatctcgtgtgcggaacggatctgccgccggatctgctgcctgccgcactctggaaatgatacggaacatcagctgtccttccttgaacggaacagctattttccttgtcaaaaggttctgaacgcgattacatgcggcctaatatgcgagcggagaacgagaactggggagatacggtacggaatcatctgtttgaccagcgcagcgccgtcatggtgcactggctgattctgctcaatgtagtcatctttatcctgggattcttcttccaagtggacatcccaaggaatatttacccgcctgtccatttggacttgatccagctttacggagcttacagcgaatatacgtgctttcacgagggggaattatggcggttgcttacctatcagtttcttcacgccaatctggggcatatcatgttcaacatgattgccctgtggtttttcggcccggttgtagaagaacgtttcggccattggcgcttcctgctgtattacctgttttgcggcgtggctgcagccctgttttcctccctgctggggtacatgggattttttgatccggaatggcgcttcattcccatggtgggggcctcaggttccatttacggcatcatggccgcatgcgcggtgctctttccccatgcccgggtacagcttctgtttcctccggttaatttgagcgtgcgccagtttgccctggccgttctcggagtcgccgcagccgtcattatcttccaatggaacaatgcgggcggggaagccggccatctgggcggcatgttcgccggatttattctgacattgctgattttatggaaggaaaagatgtcttccccaagacggaaagccgcctcttcttcccactattcccctgagccttccagccgccgcccggcacaggcttacccctctgaaaaggaggtggatgaaatcatggaaaaaatatccaggtccggcctgtccagcctgacggaggaggaacgggaaattctccggcgcgcttcccggcgctgaactatttgttagatatttttatatttttcgttattttccttcctttttgccatccatttcctagcatggatgaatgatgacgcgactgtattcctccaccgtcctgggcgtagatggcgtagaagtggaggtggaagtggatttccgccccatggcggaaaaacgcacctttattgtcggccttccggatgcggccgtgaaagaaagcgggcagcgcgtggacacggccatacaaaacagcggccttccctttcagcagggtatcttcgtcgttaatctggctccggcggatttaaggaagcagggccccggattcgaccttcccatcgccctgggaatggttgcgggagcggctgaaaaggagatggacgcttctgcctggtgcattgtgggagaactggccctggacggaaccgtacgccccgtgcaaggcattctaccgcaaatcatggaagcgcggcgcatgggcaggaagcgcatcatgctgccgcaagccaatgcctatgaagggacgcccgtacagggtgtggaaatttatcccgtttcttccctgagagaagcctggcatttgcttacttccgacgccctgccgcctccatttacaggttcagggcgagaggcccatgctccacgggacaaagacgccgctgtggattttgacgaaatcaaagggcagccttacgcacgccgcgccatggagattgcagcggcaggaggccataatatcctgctttgcggctctccggggtccggcaaatccatgctggcgcaaagactcccgaccattcttccgcctctgagtccggaggaagcgttggaaaccagtaaaatccactccgtatgcggtctgctgaaacgggggaacggcctggtggaccagcgtccgttccgggctccccaccacaccatttccgatgccgggctgatggggggaggtgcgaatatcacgccgggagaagtatcccttgctcacaacggcgtcctctttctggatgaattgccggaattccgccgtgccgctctggaaaccctgcggcagccgctggaaaccggccaggtagttatttcccgcgcttccggcaccatgacatttccgtgccgtttcatgttggcagccgccatgaatccgtgtccctgcggttatctgggagacagaagaagagcctgcacctgccccccggcgcagatcgcacgctaccgccgtaagatttcaggcccgctgttggaccggtttgacctgctgatggaagttcccgccgtggatccctccattctggcttccgcgcctgccggagaatgttccgccagtatccgggaacgcgtagcggccgcacggcggctccagtccagcagatacgcaggaacgcctttccgcaataatgcggccctttccggaaaagcgctccagaagtattgccgtctgctgccggaagggagggctatcctgctccgcgccgtggaagaactggccctttccgccagagcctatgaccgcattttaaaggtggcccgaaccatagcggatttggaaggaacttctgatattcaggatgtccatttgtatgaagccgtgcagtaccgcgctttcgagcaatcactgagggattagcattatgaatctctctcctttcgcaactatctcaaaaacaaagacatattcccgttccgaaaataaaaaagaggcagcttttcagctgcctcccgaataacgaggatatttactatgaacgtctgcggcgcagcaacatggctcccaggcccagcaggcccaaagacgctgcggcaggctcgggaaccgtttcataggaaacctgtatacctgtaattgtataagcggaagtagcggttccggcaccaccgcgcactccggcaactaccttatacccttcctcccaggtaaggggagccgccgacatatccagggaaattgtcgttgtttccgatgtagaggtaaatgaaaagtcctgtatcctggaaagttcctcaaccagagtgccggttgaatcatatacggcaagcaccatggaataactgttgattacagaagaaggagtattgcaggaaaacgtaatggaagaaacggaatccccctcctgcggccctccaagaaccatggcaaaagaatccccgctaactccggcgcgtccgcataatgtaatggttcctacattgttctcattcacccaagtgccttcaccatttattccccaatttgaaatggaattgttattgccgccggcatatattccattttgcaggccctttactttgtccagaagctcttgccccgatgttctcgccatagtggcggtctgtgatacgctttgcgattcaggaagctcagcaacaatcgtagccgcctgggcggacatcatacatacgcaactggctaacaaaacataatgataaactctcataacgctttgcattgattagaggattgttaatccgttgtcaacataaaaagttgaaagagcggtattccggcagtggacttcttttttgatgtaaggactttataaagactaatccttgcgcctcttccattctaacatctgcatgttatttcataaatcattcattattatgaatcgaacgttatcgtaaaccattcatgaagaaaataggtccagcgttttccccatgatgttacggaaagaaaaagagcggattaacaatccgctgtcccctttatccaatccttaatgataaagaaaaagccgcctcagcaaagtgaggcggctttttccaagaagactttttaacgaatagcttccaaagcctgtttgaggtccgcaataatgtcttccgcagcttccgtccctacggaaaaccggatgaggtcaggccgtacgcccgcctccatgagctgctcatccgtcaactggcggtgcgtatggctggcgggatggagaacgcaggtacgggagtccgccacatgggtcacgatggcggccagcttcagactgtccatgaacttgatggaacgttcacggcctcccttaatgccgaaggttaccacaccacaagattggccaccgcggaattgcttctgcgccaattcataatactcattggaagaaagacccggataattaatccaggcaacatcttcctgcccttgcaggaattccgccactttctgcgcattttcacaatgccgcggcacacgcaggtggagggtttccaaacccaaattgagcaaaaaggcattctgcggagactggatggaacccagatcgcgcatgagctggacggtcgccttggtaatataggctcccttgccgaagcttttgctgtaggagagcccgtgataggaggggtccggttccgtcaaacccgggaatttatccttgtgcgcttcccagtcaaagttgccgctgtccacaatcacgccgcccacggcggcggcatggccgtccatgtacttggtggtggagtgggtgacgatatccgcaccccattcaaaaggacggcaattaatgggtgtggcaaaggtattgtccacaatgaggggaacgccgtgcgcatgggcaatatccgccattttacggatatccagcacgcaaagcgtgggattggaaatagtctccgcaaagaaagctttcgtattggggcggaacgctttggcgatttcctccgccggagcgtcctggtccacgaaagtaacttcaatgcccattttccggaatgtgacggcaaagaggttgtatgtgcccccgtaaatcgccgaagcactgacgatatgatccccagcctcgcaaatattgaaaatggcaaagaaggaagccgcctggccggaagacgtcagaatggcggccacaccgccctccagttcggcaatttttctggcaaccgcctcattggtggggttctggaggcgtgtataaaagaatccggattcttccagatcaaacaattttgccatttgttcgctggtctcgtacttgaacgtcgtgctctggtaaatgggcaatacgcggggttcgccctttttaggcgcccagcccgcctgcacgcacagggtctccggtctcaattcctgattcatcatgcggggcatgctatgcgatgccacctgccttgtaaagcagggaaaaccagacgtatggacaaattcgcccctgcccccgccgaagcacgcttccgggtttttcccaatgtaaaacccctgttcccggtaaatcaaccgcaaggacaggggcgttttacctgcgcgcgggataccctacgatcaaatgaaacggcaattcctccgatacccctttcccggaaccaaccgttccccggtgaataaagccgggcatctcactacttgatttccggcaagggggtggaaatttcctcttccgtcagatagcagccgggatcggacccgtaccagtgtccgttggcaaacgcggcacgggtgcggaagcctccgccgcacagggcgaagtgaacgcagcggccgcaacggccttcaatcttcttctgccgctccagaggatcgtcggaaccgcgcagctcaggcaacatttccgctgcagctccggccctggcatcccataaatcggaaaaccggtcacttttcacattgcccagagtaacggattgccagaactggtccggatgcacggcaccctgtgtgtcaatattggcgatgccccggccggaactgttcgcgccgccgccattccattgaagcaggccgagggtttccttcgccagaggggagccttcccggagctggcgcagaagcaggtaaattccgtccgcaggctgggttacagtcagcacttcacggttttttccctccgctttccattcctctacacgggcaatcagcgtatccatggcattccttgcttcctcctgagtcagggtctgcacttccacgccgcggccagtggggaccagatggtaaaaacagacgcgctggatgtcgttggcgtcaataaaatccaaaatctggcccatgcactgcacattgttgcgggtcagagtcaggcgcaggcctgtcttttgccccacttcactgcaaagcctgaatccgcgcaccgcctgctcaaaagaaccttccacaccgcggaatttgtcatgaacggcgccaatgccgtccagggaaatgcctacgtacgccacgcccaattccttgaaccgcgctgcagcttccggcgtaatacgggtgccgtttgtggaaatggtcaccttcagcccttttccggtggcacgttccagcagttccataaagcgcggatgcaccagcggctcccctccggaaaaaaggagggcattcaccttgtagtccgccagatcatcaatgaccgcgcaacactggtcccaatccagctctcccttaaatttccgggcagaggcgtctgcataacaatgcacgcatttgagattgcaggtacgcgtaatattccacaccacaatgggcttgcgcgcacgggacgaagccggtgcacaggattccacggcgccccctgcaaaacgaccgtgcccgtggccctgtccgtatctcaaatggtccgcgggctgttccgcccctgtccaaagtctggtaatattaatcatggtgttgtgaaagcctgggctgataagggcagaggttgtcttccgccatcatgtctccgtaaacggcataagcgcgagaccgggaccctccgcagatggtacggtactcacaccgtccgcatttgccctgcaacgcattgtcatcccggagtttgaggaaaagggggtgcgtgcggtagatttctccagggtcatccgtccggacgtttcctgccgttatggggagaaaaccggagggctgtatttccccggtatgagaaataaacataatgcccttgccgtcccgggtgggaatggcgcggcgagcaggcttgcttccctgagcacgggcttcctgaagcgccacgcggcgataatggtgcccttccgtcgttttgacgccgaaagaaacctcatggcttatcctgctcagttttttccagacggcttccacgtcttccgccgcaggcatctcatccatagcggcgcggcctgtgggcaccagaagaaacacgctccacatgcccggtttcatttttttcaccagctccacaaagtcgtcaaattctcccagcgtgctcctggtaatggtggtgttgatttgcaagtgcatgccggcttccttcgccatttccgcagcccggagagtccgttcatatgtgtgggggacgccgcggaaggcgtcatgggtactttcatgcgcaccgtccaggctcaatgacatgctctgaaccccagcttctttcaacgcatggaaatccgtgtgcaacagccgggcggtagcagcagggctcaatgctacatgcagccccttgccggaagccgcacggaccaattccagaatatccggcctcatgaccgggtctccgcctgtcaacaccagcatgggaggccgcagttccgccaactggtcaatcaggcgcaatgcctcctcatgagtcaattcatccgggtggggacgcggctgggcgacggcgcggcaatgtctgcacgcaagcgcgcaagcgcgcgtcacttcccagaagaccaggaaagggcgttcattgagatctgtttcactaaaaaccgggcgcatttttcaggacagccaatttagaacaattataattttttgaccagcccaaaaggacgcatcctttaaaaagttcacttagccgcctcttcacggattttttgaacttccttaggcagttcggaaagggaattcagagcttccttcaggttcctggaagcatccggagaaagcatgatggccgttacatgcttgacaatgggctgcatcatttccacaagctgctgctgcactcccatcagcttggcctgctggttgcgggtgagaggcggcagggcagcctgtttcctggcaacgtccagcatagccgcccggtagcgacctatctgttccacagcagccttgccggtttcttcatctcttaccctggccagagagtcgttaagcttttttacttcctccacagttttggttagcagggtttcatgcgtgttgccctccgcatcctcctggaacggctccgcctgctcagccttatcccgggaagcctgcgccagcttcttctgaacagactgtaaatccgccagggccttttgcaaatcgggcgtaagcagaccttccttcttcaaacgggacagagattttatcaattcacctgaaattttctgtgcttccgtcatctgggcggaaacctgagcctgctcctgaagcgtggcaccaggaagttccagctgtcttttcccaatgtccagcagctttttatgaacttttttaaccgtttccacagcagcggccgctccaggttcatccgttaccttgtccagagccgctgcgatttcatgcatgctggcaacgctctgcctggtcagggaaagatgggagtcctgggcaaatgcggaggctgttatgcaaacggcagtgcccaggctgatggaagcaacaattttattcatgatacggaagcctttccggtatggaagaatacgttttcctcctttccccgtcaatggcggctattgtcaagaccactatatgaaaaaagggctgtccgcaaacaagcggacagcccttttgaaatcttaacagcccggccttagtcgcgctgctggcgtgaatacttgtagtagctctggaagctgagttccgcagggaattcgctcaggccgccattgggattgtattccttgaggccgctcatgccgcagcgcccctgataagggggcttgtacgtgcatttgtaagtgggagcccagaaggtgacaagttcataaattccgtagcccatgcgttcaaacatggtagcggtgccatcaacaatgcctacggaaaaaccggcataatctccctcgcggctcgtccagttgatgattcccagcgggatttcttcaacggaataaataaggttggcgatggcgcggcccagcttgcgggtgggggtgtattcggaagcggggggagcctgaatgtccgcactggcgacaccaacgacgccggcggcaaaaagagctgagatgatggcacgtttcatactgattgtttatatagtataatttgtcgagggaaagcaactcaaaaaaacaaaaaatcaatctaattccggccgggggtcccgcgtcatgagttccgcaagcgcttccatcggcggcttggattcataaagaacggaataaacggcgtcaatcaggggcgtcctcacctccagcttccgcgcaatttcatagacggacagcgtgttgggcaccccttccgccaccatgcccagggtatccaggatttcctgaaggctcttcccttccgccagtctccgccccaccgtctggttacgggagtggcgggaatagcaggtaacaatcaaatcgcctactccggaaaggcccatgaaggtttccctgcggcctccgctggccacgccgatgcgcgtcatttccgccaggccgcgggtcagcaaagcggcctgggcgttatcccccaggttcagcccttcgcataagccggccccgatggcaaagacgttcttaatggttccgcccagctgcatgccgataatgtccgtagcggaataaacacggaaggttttggatgcaaatatctgctgcacccaatccgcatacttcggatcttcaaatccaatcagggaggcggacggaaggcccaggcagatatcttccgcatgattgggaccggaaagcacgcctatggggttggagggcagatattcctgaaggatttccgtcattcttttatgggttccctgttcaatgcccttggtgcaggagacaatgacggcatccggctgcaccggcaggctgcgcagccgctgggccacggaacgcatggccacggaaggtaccactactacaatgagttccgcatccttcacctggcccagatcgcaagtaggatggatattgggggccaggggaagggcggttttcgaaaggacggggctgcgtcttgtttcggcaagctgcctggcctgagcctcttccggcgtccacaggacgacttcacattcccgggtcgccagaaccatggagagggccgtgccccaagaaccggctccaatgactgctattttatgtaaccgattcatcatcttacttggactttttggaatagaaggagtgctccgttccgttgagaagccttgcgatattggaacggtgcttgagaatcaccagcgcgcctaccaccgtgaaaaaggcgacgtaaagtatctggggggagacatccccgtcctggcaaagcggataaatccaccatccggcggcgatcatcaccacagcggccaccaggctggccagggacacgatgccggagattcccataaccaccagccaagaagccagagctacgcaagccaccaccggattgagggcaaataaaacccccgcggttgtcgctacgccttttcctcccctgaatcccaggaaacaggtgtaagtatgaccgagtataacagcgaaacaggagagaactaccaagacattgaaatcccagccgcccgcatcccccgtcaggaacggcagccagttcaaggcgccgaacacagggatgaacccctttaagaagtccagaatgaaaacggaaaggccccacttccagcccagtacgcgccacgcattggtagcgcctatgttgcgggaaccctgctgcctcaggtcaatccctctgattctgccggcaaggtagccgaacggaatcgctccgatcaggtaatagaaaactatccaggcaatcatgttgtgcggagtgcattttaatcccccgccggtcaaatgacaatggggaaatcacctccggcccggttctttccggaggggttgctcccgtaaaagaacaccatacctgacagcctcctccagatcctcattttcaaggctctccgtgccccggtctgcggaaaagccctgtttaaggcgcaataagaacagcgcgaacattttcccgcccgcccagaaccatgctcccgcacttccttcgccggaataagcttatttaccgccctcgcagggtttccgcatgacggcagcccagacggaggcattatcctgctggggctccagcatatccttcacctgttccataatgatccccaccagctccctgctggaacaatccctggccttttgaagagccaggaaagaaggttctctcaacagctcgctccaaacctgcaagccatccgagcatgccagcaccgcatctcccggatgcaggagcaggggcatggcgctgatgtccaccagttccatgggaccgcccataacggcggaacggagaatgcaacgctgccggagcgcaccctgaagtgacattttccccttccggtaaaggcaatccgcaatcggtctcatggaatggtcttcattcagacggtccatgcgaaagctgtccgctccgctccataaatacaggggggagtctcccacgctgatccaccacaggaaatggtcgcggatgaagacggccagcaatgtggttccggattcctccggttccttctgaatggcggccaacgccctgttggcagcatgcaaagccgccgttaaacgttccgggatatcctcgatgccgctttccgcaaataccgcagcaaattcctgcgccaccacacaggaggcgcaatctccgcgaagatgccctcccatgccgtcgcacacgatgcccagcatcccgccggcggcgggaagacttttaaccacgtcttcctgctcgcggcgtttgccgatccattgggcggaagcgcagtccagaatatccggggtgcggggagccatgcggccggtggttcggattaactgtccttacgtttcaactgcgggaagagcagcacgtcacggatggaagaggcccccgtcagcatcatgacgacgcggtcgatgccgatgccgatgccgcctgcggagggcattccgtattccagcgtttcaatgaaatcatagtccacacgctgggtctccccggcagcctggtgctccaggcgttccttttgcacgtcaggatcgttcaattccgaatagccgggggaaatttcctgcccgttgatcaccagttcatatacatccactacgtccggattttcccggttcagcttggccaggggaaccaagtccttggccacgtgggtaacaaagcaggggttcatggtcttttcctccaccagtttttcatacacctgctgggaaacatccacatctttcatatccgggctgatttccactcccagctcttcacagcgggcgcggcgcgcttcgggggaaatgtcaaaccagtcttcccccgccacgccccggatcaggtcctggtagtcggcgcgtttccagggacggctgaggtcgattgtgtaaagaacgttgccttcagcgtccttgtggtcaatctgaaggccgccgcagaatttttccgccagatggcagatgagctcctccaccatattcgccatggtttcaaaatcaccgcaggcgcaataggcttccagcatggtgaattccgggttgtggcggcggtcaattccttcattgcggaagctgcggttgagttcgaaaattttcgtgaagccgcccaccatcaggcgtttgaggaaaagctccggggcaatgcgcagcgtcagcggcatatccagcgcgttatggtacgtttcaaacggcttggcggcggccccaccggccacatcctgaagcatgggggtttccacttccagataaccgcgttcctggagaaagcggcggatttccgcaatcatgagggagcgcgtaacgaacagggaagcgctttcctcattggaaatgaggtccaggtggcgcttgcggtaggtcacctccttgtctgccagcccgtgccacttgtccggcagggggcggaggcttttggaaagaatagtcagtccggatacctttacggtaggttctccggtacgggtcaggaacgtggttcccctgatgccgacccagtccccgcggtccaggagcttccaaagcttccaggtggtttcatccacctcatttttatgcaggaacccctggatttttccccgtacgtccccaatgacgaaaaactgggatttgcccatgtcgcgaatagccagaaggcggccggcgacggctacctgtttgtcttcctggaaatcggctttcaatccggcgggagtggtggtcacgtcaaatcttgcgccgtaggggtcaattcccagctcacggattttggcgagcttgtcgcggcgcacggcaataagttcggattccgtcgtagtcggatgtgcctgctgttgttcggacatagtgcggggattctaaaggcttgcttccgttttggctagcgcattgtcaggcagaggggacatttttggcggccggttttgacccgaaggttcctccccccctttttcggaagccggacgccggaacatgccccagtattccggccgttttgcaaaaagcctggacagaaccacataaagcacgatattcaaaggaattgaaacaaaactggtcttattattaaaaaatggccggcaaatccccacatacgcataattgcttttacctttggcaccagacatgttataaatgttcccgttaagacgcaccttatttatcaattatatactatccgtgcagacttatgagtgatcagacaaccgtaacttacagcacgattgacgctaacgaagccgtagcctccgtagcctatcgtttttctgaagtcattgccatttaccccattacaccatcttctccgatgggtgaatcagctgaaagctgggccgctgtcaacaggaagaacctgtggggcaccgttccctccgtagtggaaatgcagagtgaaggcggcgcggcaggcaccgttcacggcgccctccagaccggagcgcttgcaactacgttcaccgcatcccaggggctcctgctgatgatcccgaacatgttcaaaatcgcaggggaactgactcccgccgtgttccacgtagccgcccggtccctggcttaccaggccctttccatttttggcgaccacagcgacgtgatgagcgcccgctcctgcggatgggccatgctgtgcggctcctccactcaggaagctgcggacttcgccgctatttcccacgccgctacactggaatcccgcattcctttcatcaatttctttgacgggttccgcacgtcccacgaaatcggcaagattgcagacatcacggacgataccctgaacggcatgattaagcaggaatggctggattccttccgggaacgagccctgactcctgatgctcccgttctgcgcggcactgcccagaacccggacgtttacttccaaggacgtgaaacggtcaaccgtttctatgaagccactccggctattgtccagaacgccatggacaaattcgcggaacttaccggccgttcctaccatctggtggattacaccggcgctccggacgccgaacgcgtcattatcctgatgggatccggcgctgaagctgtggaagaaacggtagaagccatgatgacccgggaaaacgccaaggtaggcgtgctgaaggtgcgcctgttccgcccattccccgccgccgaactcgtcaaggccctccccgctacggtcaggaaaatcgccgtgctggaccgcaccaaggaacccggctcccagggagaaccgctccaccaggacatcatccaggccctcttcgacgcccaggccaacggcacgctgcccttcaccaacggcatgcccaaggtggtaggcggacgctacggcctctcctccaaggaattcacccccgccatggtcaagggcgtctatgacaacctggctctggacactcccaagaatcacttcaccatcggcatcaacgacgacgtactgggcaccagcctcccgtatgatgaagattattccacggaagcggacgacgtgacgcgggccatgttcttcggcctcggttccgacggcaccgtaggcgccaataaggacgccatcaagatcatcggccagcatacgaacctgtatgtgcagggctacttcgtgtatgactccaagaaatcgggttcctccaccatttcccacctgcgcttcggtccccgtccgatcaaatccacatacctgatcaccaaggcaaacttcctggccctgcaccagccttccctgctggatctgttcgacttcctgaagaatgccgccaacggcgccactttcctgatgaacagcccgcacccggcggacaagctctgggacacgctgcccgcccgcatgcagcagcagattctggacaagaacatcaagctctacacgattgacgcttttgccgtggcccgcaaaacgggcatgggcggccgcatcaatatgattatgcagacctgcttcttcaagctggccagcgtgattcccgcggacgaagccatcggctacatcaagaaggccattgccaaaacctacgccaagaagggccaggaagtggtggacaaaaacatcgccgccgtggacgccacgctggaaaacctgcaccaggtggacacaaccggaaaaactgtaaacggacacgccatcccgcccgccatgtccccggacgctccggactacgtacaaaacgtccttggcaagatgatgtgcggtgaaggcgacagcatcccggtcagccaaatgcccgtggacggcacattcccgaacggaacgtcccagtacgaaaagcgcaatctggccctggatctgccggaatgggatccgaccctctgcatccagtgcggcaagtgtaccgccgtctgcccgcatgcggttatccgcagcaaattcttctctcctgacgctcttgcaaacgctccggaagggtttgaatgcctggatgccaagcatccggactggaagggagagaaattcgtcatccagatttccccgaacgactgtacgggctgtacgctctgcgcggacgtctgcccggccaagagcaagacggatccgacgcacaaggccctgaccatggtcccggccgggaagattcacgacaaggaagaagccaattggaatttcttcctgagccttccggacgtggaccgcaccaaggtaagaacggacaacatccgctccatgcaggtgctgcgcccgctgttcgaattctccggcgcctgtgccggctgcggtgaaactccgtatgtaaaaatgctctcccagctcttcggcaaccgcctggtggtcgccaatgctacgggctgctcctccatttacggcggcaacctgcccaccaccccgtggtcccatgactctgaagggcgcggccccgcctgggccaactccctgtttgaagacaacgccgaattcggccttggcttccgcgtctccctggacaagcagatggaacacgccattgagcttcttcatgaagctgccggcgccgtgggccaggaactggtggaccggatactggctaatccgcagaaggatgaagcagacatcgcccagcagcgtgaaaacattgaagaactcaagaagaaaatcgccggcaagccggaatacgcgcgcctcctgacccttgcggataaacttgtccgcaagagcgtgtggattctgggcggcgacggctgggcctacgacatcggctacggcggcctggaccacattctggccagcggccggaacgtgaaggtgctggtcatggatacggaagtatactccaacaccggcggccagtgctccaaatccaccccgcgcgccgcagtagccaaattcgccacgaacggcaaacccggcgtgaagaaggatctgggcctcatggccatgacttacggcaacgtgtacgtggcctccgtcgctctcggcgccaaggacgaacatacgctgaaagcctttgtggaagcggaagcctatgacggcccggctctcatcatcgcctactcccactgcatctcccacggcatcaacatggccaagggcctgcagcaacagaaggcatgggtggattccggccgagtcctgctttaccgctataatccggacctggcccgccagggcaagaatccgctgattgtggaaggcaagggcccgaagggcgatctgcgcgatgtactgctcagcgaaaaccgcttcaaacttctggcgaagaccaataaggaaggattcgaaaaactccttgaagaagcccagaaggatgtctggcaccgctggaacctgtaccaaagcattgccggcatgggtgccgacaaacctgcggaataaggtataggccgcttaatttcaacgcccctgtccggcttatccggcaggggcgttttttactgccgggtattcatgaaaaacaaaccatgaatatttcggggaggggactgcttttccgccccgccatacagccacgcaagcaggcttcccgcgccagtactttcccttcctgaaagccggagaattcatccttcccccgcagcacaaaaaagggcgcacaccttgctgcaaggccgggttttaatagatcaccttatacgggttaatttccgcatggaggttttgaagtccttcaatggaaccgcagcctttgcggccagccatgtccaagacaaagaggggcatttcatgcggccagggtaatactgtttcctcacaccttcctccccagaggagcgcggcccgttttcctgcggaccgcgccggtggaaaaaccggaaaaagactttaaaacagggatgctgcttcaagattcccgaaaatggtgcacaccggaggaggaatataccattccggatgccgtatccgggaagtgcaccacatcaggcgtcaggcgagtgcccacatccagatagatcagtttctccgtagcggatccgttgcgaataacatgcgctccctccgggctggcggggaatgcaatcgcatccccctcttttaaattcttttcaccctcaggcgtacgcacaacggcatggcccctgatgatgtaaaatacctcttcattcacttcatgataatggtagccataggcgtaccgccccggctccacttccacgaaactggccgcacattttccggcatccgcttcccggatgacgggctttaccgcaaaggaattaccctcccggctgataacctgaggctccgtctccctgtaattggcaatgatgatcttgttcatggcattatctgttcatgcttgccgtaacggcaggcacttattaaaataggcggcaacattctttttgtaaagtaggcagaaaatagtaccctagattcctgaaagaaaccattgcttaaaataaatgacttactataattcatcatgccctgttgaaactactctccaactgatttcctcccgctggaaagtgctcatcctccgcgatctgctcgaaggcacccggcggtttggagaactccgcaaatccattgggcctgtgacgcagaaagttctgaccgcgaacctgcgttctatggaaaaggacggcctgcttacgcgaaaggtgtatgcggaagtacctccgcgcgtggaatatactcttacggaactggggcgcagtctgcgccccgtcctggcctccatggcggaatggggatcgaaataccaaagagaaaaccgctgatcctcccccctttccggagcttaaccgaacctccggaaagacatggaaatacagcggtttccctttttcccgcaagaaaggtcagcgggaaatttccgtcgttttacggataatttcgcgggctttccgcacgtcttcctcatgggaatccccgcggcttttttccacggtaaagagcttggaaagctcttcatccatgcgggctacggcagctttcgccttaggattttttgcggcgcgggcgcgcaggatattgaccttttcaaattcctccagtccgtcccggagtttttcaaaccgcagggaactgagattgccgggataaacaaggtagcagtctcccgcgggccagttcccgaaatccgtcttttcaaacggattgcggttccaggaattataagcccatctcaaaaagccgtccaaatgattggcggcggcaaagaggggaagccattccgcctccgccagcggagaaatagtgaaggtgttgggctttttgggatggacacagacatagaacgtcgtcttttttccctcctttttgcgctgcgccagcagatcgcccgtgaccgtgcctgcatggtcaattacaggagagacgtcataaacgtcccgggtcatggccgtaggccgattgacggcggaaacgattttgaattccggggcatacttgtccagtacattcttggccgccctgaccatagcgtccggccgttcatccagcccgatgcaggttttgcccagccagcccttgctcttgacgtgcttgcgaaaatccgtcaggaaaggcccccagatagcttcataggagggatcgttcggcttaagatccagaaatttgtactttccggtcgcctcatccagataacggattttcatgttccagggaatcatggtatagcaggatatctgccccttgacgcccacctcgttcatcatgaaggaaacccacttgtcaaaattggcgtaattccagcgcatggttccgtttttgcccttgacccattcaatcatgggcgggaaccagtcataagtctgggcattccaggcttcatcaatcagggagcatgtaatggccttttgcccggcatccgccagccttttcatcaccggcttcatcagtgcgaaatgctccggagaccacggttccacatcatgccagcgggccacggcctgcggatgctgccacaagtccagatgaacttgccaatgcgcgggagcagggagggattccggcgccacctccagaattaccggcacactgacgggagagccgctttctgcggaaactaccacttttcctttgtacacgccgggtttggcagacggggggatattgacctccacccataccggacgcacgcctccggcttgcaaatcgcagctgttttcgctgccgatgatatctgaaatcagcctgttgccccccctggtgtagcgtatcatggcagtccggacagggataatctgtccggcagcgttttttaccccggcgcaggaggccgataactggggctgcgcctgggaagaccagacggcaatctgcccgccggcgcgttcgcctctccagccggacagacgcacggcatcctgaagcatttcctgcccgggagcgccattgtaaggaatacggtcataatccttcaccgctgcagcctgcaggctcagggcggcatcgggtccgtaccctttgatttccaccagatgcccccccttctcattgccggcgctattgcccaaaaaagtgattttaacgtaacggaccgtctgcggattgaatttgaagggaacaccttccggagtggcggcaatgctgttggaagactgatccgccaacattttccagttctttccgtcttcggaaccttctattttatatttgtaaatgcgtcctccttcccaatagggccatacatgcagggaggaaagcgtccggggctttcccatatctacttggagccagacgggaatgccctcgcaaccccagtatttgccggcgttattcgtctgcccgtccacggccagttccggacgatcactgccgtaatgaccggaagcggttactttggctccggcaaataaattacctgcatcacccggagttcctgcggaaacaagggcgggttcatacaggggatgcctctccagggactgggcctggacaaaaaacgttaaggcaatagcggaacacagaggaaaaaaaagacagcgcatacgcatattacgcgccggaatttcattttctctcaaaagaaaagctgtttccgctattccgccaaaggacgtacgggtattcctctggaggcaaagtaagccttggcttccggcaccgtgtattccccaaaatggaaaatggaagccgccagcacggcatccgccttcccttccaccagcacgtccaccatgtgatccaaattacccgcacccccgctggcgattaccggaatgcgcaccgcactgcttacggcgcgggtcaattcaatatcataacccgttttggctccgtccgcatccatgctggtcaacaagatttccccggctccgcggcgttccgcctccacagcccattccacggcatccagccccacgaatttccggcctccatgagtggaaacgccccacttgccggaagcctggcgcttggcgtcaatagcgacgacgatgcactggctgccaaaagccgccgcaccttcattaatcagctccggccgattgatggccgccgtattcagggaaaccttgtccgcacccgccagaagcatttcgcgcatgtcctttacggaacggatgccgccgcctaccgtcagcggcatgaagcagcatgccgccgtgcggcgcaccacgtccgccatggtggcacggccatcggaagaagcggtaatatccagaaaaacaagttcatccgcctgctgggcatcatacgccctggcacattctacaggatccccggcatctctcagattaatgaaattggtccccttgacgaccctgccgtccgttacgtccagacacggaatgattcttttagccagcacagccctatcaagccatcaccgccgccaaaggaaaagcctaaaatacggcttgccgcgggatgccttttgataaacatgttccctttttgaccaaggccctcttcggcagcgcttccatcccgcatatccacggtaagagaaatttactgaaattcatcaatatcactattccactcactttccggccgaccctgcaccgccatgaagaaacgcagtgcggcatctgcccctttcccgcccgcatgcataaaacggcctaagagcttttctttccatgtccaggtggtagagtccgcataaggcatttccattcatgaccactacacgctcgggattcaccaaacttgcagccgtctgcattgccattcttctgggggcggtggtctgggagctgggctggcccctgacgcgggcggaacatgagtggtcgcggctgattgcagccgttgccacgctgggccacctgacgggcattctgggttcctatttccggaaggaaatcaaccgcccttccctgaggctcctgattttccaaatcatcagctgcctcatgatttttctcctgattgccagggaacaacaggaagcgggatacatgaggttcacggagctttcccgcctggtgattacggccgggctgattgccatccccacgctgatgtccctgaccaggatttttgaatggttggtgggcaagcaaaaaaaaggccggcctcttatggcccccgccatgcagtttgtagcttctctgggagtagtcatcctggcaggcaccggattgcttctgctgcctaattccacatatccggatattacactcagttttacggatgccctgttcaccagcaccagcgcagtatgcgtcaccggtctgaacgccgtggattttgcccatactttcaccccgctgggagaaatgttcacgcttgcccttatccagattggcggattcggcatcatgacgttcgcctacttcgtagccatggtggcaggccagggtttttccctgagggaccgcgtgctgctgacggatctgcttgatgaagacaatctgggggccgtcgtctcctttatcaccactattgtggtcagtacgctgttcatcgaactgtgcggcgccgtccttctttatttctcctgggaagggaaggacatcaacctgatgggggagcctttgtggtggcattccctgttccactccgtttccgccttttgcaatgctggtttttcaactttcccgatgaatttgatggagccgggcatccgcctgtgctacagcgggcaggcggtcatcatggcactgatcgtatgcggcggcctgggattcggcatttacaaggaaatcaattcgcgcctggcaaaccgctttttttccaaacaccgccgcctgcacatgcagtggactccttatttcaaactggtgatgatctccacggggattttgctggcgggaggcgccctggccatctttgccgtttcctctccccatgccgcggaaccgttgggggaacacctctggatttgccttttcgacagcgtcacggcacgcacggcgggattcaatatcagcgactacggccgctatctgcctgcagccagcctcattatgtgcggtctgatgatggtgggaggcagccccggcggcacggcaggcggcatgagaaccactacctgcgccattgcaggcgcggaaatcctgcgcatcctccgcggcagggatcatgtggaattcttccgccgccgcatcgaccagcgcaccgtggcgcgctgcgtaattaccgtggtggtctcctgtgcctggatcggctgctttaccgtcctgatttgcgccttggagccctccatgagctctctggatatcttctttgaaaactgcagcgcttttgctacggtaggcgtgtcgcggggcattactccagatttaagcggcccttccaaataccttcttatcgtcaacatgctcgccggccgcgtggggctcttcgcttttctcattgcgctggccggcacccctactccgaggcattaccgctatccatccgtcaaaatcccgttaacctgaatataccattatgagatacaccgttatcggcctgggccagtttggacaggaactctgcacagaactttccgcccgtaatattgaagtagtagccgttgcctccacggatgaagaattggagcaaatcaaggatctggtgacttatgccgtggtgacggattacactaatccggccgctttgcgtgagttggaactggacgaccagtccgccgtcattgtcgccatcggagacagttttgaagaaaaccttctcgtcgtcacgcaccttcagaaaatgggcgtccgctacatctacgcccgcgtcatgagtccggtacacgaacacattttaagccagatgaacgtgtatgcgctcatcaacttgtcccgcgtggcttccaagcagctcgccagccagttggaatccccggaattcctgcgcgtctcccccatggacgaaaaccacagcatcgtggaaatagccgtgccgcgcatctgggtgggcaagcgcctgcgggatgtgggcctgcgcacggaacaccacctcaacctgctcaccatccgccgcggggaggcccagactccgcaggggcgccgggaaatcctgtccataccgcgcattcccgtcattggcaccccttccccggatctcgtttttgaagaccatgacattctggtcctgttcggcaaggaaaccaatttgattgaattcgcccaattatccaaaggattgtaaaccatcttccgcgagcaggctgagggtatccctctccatttcagaaaaaggcgacggataagccgcctgtgcaaacagcctccgtcctggttttactggcttgacaatgtctcaaaagaagccaccagacgtttttcggagacgcggcccttgacggagatggcgggagcgaaaacggccaggcggtattcttccagcaaataaccgtattgcatccagcgcaggtctccggcatgttccttcaaaacctgatgccagggaaaatacacgcgttcaaagaggtccaggcgttccaattccctggcaaggggttgctggccgatgcgtctgatacgctccgcaattccctgcatgtaccgtttcaggtccggcaagcgttccgctccatgcgcccacaggaaacgggggcgtaacaaccagtcaagctggcgctgaaggtcagccgtgatgcgctccgtatggcgcacgcccttttgcagcgccgtaaagtccctgacggcatgttccgtacccgccaccagttcccatatatccgccacgttatgcgccgcgtcaaaaaggttttggcgcagattcatttccgcagcagcgaattgctccgccgtgcgcggcaaaggacggcccatggctatctccgcggcaacgtccaccaggtcttccgcattggtagacggctcccgtccgagcatatgaagagagagctttccttccagcttcaacggaaattttctgcggagatggttaagctggtccgtctggcgcaggcgcatgaaacgcaggcacccttcccggtgggattccgcagcgctcagttcatcctcaaaggcacggacgcccacggatgctccttcatccaccagagccacataacccggccttcccgccacatccaccgtgtattccaaatctccgcagctccattccttcatgccggttacggacacgatatcctccgctgtttcctggaaccggcgggaaagttttttacccaggcggttattcagttccgcaacatccgtgcccatggcaagctcttccccttcatcatcacacacccatattttcgtaaccagctccgcaggaagacggttcatgtcaaaaaaggagggcgcgcaaaattttcccgtttccacttccacaaattccgccagtttccccgccagcggcccgtccggttccaggccatgcctcagttccgcaaagtaagcggccttttggctgataggctggagaaagacgcgcaaatccttgggaagggaacgcagcaggcattccgctcgctgggccagatggccgggaaccccccactccggcaaccattcgggaatatccggcaactggtcgatgtggacgcccagggtcacgccgtcatcttccgcgccgggatcattctggtaatacacggcatattccgctcctttacaggtgatttcatccggaaaaccatccagcaggtctttcccccagaattcgtacatggcttcctgcggcggaacatgcagagcttccgggtttttcttctccacaccggcggcccaccgcaaaaaagccctggccgtacagcagtccgggggaacaagcctgttaa

SEQ ID NO: 7 - DNA, 2711102 bp, Akkermansia muciniphila (residues 1-1,355,551 of 2,711,102)
  source 1..2711102: mol_type = genomic DNA
gacttcgccgctatttcccacgccgctacactggaatcccgcattcctttcatcaatttctttgacgggttccgcacgtcccacgaaatcggcaagattgcagacatcacggacgataccctgaacggcatgattaagcaggaatggctggattccttccgggaacgagccctgactcctgatgctcccgttctgcgcggcactgcccagaacccggacgtttacttccagggacgtgaaacggtcaaccgtttctatgaagccactccggctattgtccagaacgccatggacaaattcgcggaacttaccggccgttcctaccatctggtggattacaccggcgctccggacgccgaacgcgtcattatcctgatgggatccggcgctgaagctgtggaagaaacggtagaagccatgatgacccgggaaaacgccaaggtaggcgtgctgaaggtgcgcctgttccgcccattccccgccgccgaactcgtcaaggccctccccgctacggtcaggaaaatcgccgtgctggaccgcaccaaggaacccggctcccaaggagaaccgctccaccaggacatcatccaggccctcttcgacgcccaggccaacggcacgctgcccttcaccaacggcatgcccaaggtggtaggcggacgctacggcctctcctccaaggaattcacccccgccatggtcaagggcgtctatgacaacctggctctggacactcccaagaatcatttcaccatcggcattaacgacgacgtactgggcaccagcctcccgtatgatgaagattattccacggaagcggacgacgtgacgcgggccatgttcttcggcctcggctccgacggcaccgtgggcgccaataaggatgccatcaagatcatcggccagcatacgaacctgtatgtgcagggctacttcgtgtatgactccaagaaatcggggtcctccaccatttcccacctgcgcttcggtccccgtccgatcaaatccacatacctgatcaccaaggcaaacttcctggccctgcaccagccttccctgctggatttgttcgacttcctgaagaatgccgccaacggcgccactttcctgatgaacagcccgcacccggcggacaagctctgggacacgctgcccgcccgcatgcagcagcagattctggacaagaacatcaagctctacacgattgacgcttttgccgtggcccgcaaaacgggcatgggcggccgcatcaatatgattatgcagacctgcttcttcaagctggccagcgtgattcccgcggatgaagccatcggctacatcaagaaggccattgccaaaacctacgccaagaagggccaggaagtggtggacaaaaacatcgccgccgtggacgccacgctggaaaacctgcaccaggtggacacaaccggaaaaactgtaaacggacacgccattccgcccgccatgtccccggacgctccggactacgtacaaaacgtccttggcaagatgatgtgcggtgaaggcgacagcatcccggtcagccaaatgcccgtggacggcacattcccgaacggaacgtcccagtacgaaaaacgcaatctggccctggatctgccggaatgggatccgaccctctgcatccagtgcggcaagtgtaccgccgtctgcccgcacgcggttatccgtagcaaattcttctctcctgatgctcttgcaaacgctccggaagggtttgaatgcctggatgccaagcatccggactggaagggagagaaattcgtcatccagatttccccgaacgactgtacgggctgtacgctctgcgcggacgtctgcccggccaagagcaagacggacccgacgcacaaggccctgaccatggtcccggccgggaagattcacgacaaggaagaagccaattggaatttcttcctgagccttccggacgtggaccgcaccaaggtaagaacggacaacatccgctccatgcaggtgctgcgcccgctgttcgaattctccggcgcctgtgccggctgcggtgaaaccccgtatgtaaaaatgctctcccagctcttcggcaaccgcctggtggtcgccaatgctacgggctgctcctccatttacggcggcaacctgcccaccaccccgtggtcccatgactctgaagggcgcggccccgcctgggccaactccctgtttgaagacaacgccgaattcggtcttggcttccgcgtctccctggacaagcagatggaacacgccattgagcttcttcatgaagctgccggtgccgtgggccaggaactggtggatcggatactggctaatccgcagaaggatgaagcagacatcgcccagcagcgtgaaaacattgaagaactcaagaagaaaatcgccggcaagccggaatacgcgcgcctcctggcccttgcggataaacttgtccgcaagagcgtgtggattctgggcggcgacggctgggcctacgacatcggctacggcggcctggaccacattctggccagcggccggaacgtgaaggtgctggtcatggatacggaagtatactccaacaccggcggccagtgctccaaatccaccccgcgcgccgcagtagccaaattcgccacgaccggcaagcccggagtgaaaaaggatctgggcctcatggccatgacttacggcaacgtgtacgtggcctccgtcgctctcggcgccaaggacgaacacacgctgaaagcctttgtggaagcggaagcctatgacggcccggctctcatcatcgcctactcccactgcatctcccacggcatcaatatggccaagggcctgcagcagcagaaggcatgggtggattccggccgagtcctgctttaccgctataatccggacctggcccgccagggcaagaatccgctgattgtggaaggcaaaggcccgaaaggcgatctgcgcgatgtgctgctcagcgaaaaccgcttcaagcttctggcgaagaccaataaggaaggattcgaaaaactccttgaagaagcccagaaggatgtctggcaccgctggaacctgtaccaaagcattgccggcatgggttccgacaaacctgcggaataaggtacaggccgcttaatttcaacgcccctgtccggcttatccggcaggggcgttttttactgccggatttcatgaaaaacaaaccatgaatatttcggggaggggactgcctttccgccccgccatacagccacgcaagcaggcttcctgcgccagtactttccctttctgaaaaccggagaattcatccttcccccgcagcacaaaaaaggggcacaccttgctgcaaggccgggttttaatatatctcaccttatacgggttaatttccgcatggaggttttgaaggccttcaaggaaccgcagcctttgctgccagccatgtccaaggtaaaaacgggcatctcatgcggccaagggaatactgttttctcacaccttcctccccataggagcgcggcccgctttcctgcggaccgcgccggtggaaaaaccggaaaaaggctttaaaacagggatgctgcttcaagattcccgaatgacgggctttaccgcaaaggaattgccctcccggctgataacctgaggctccgtctccctgtaattggcaatgatgatcttgttcatggcattatctgttctgcttgccgtaacggcaagtacctattaaaataggcggcaacattctttctgtaaagtaggcagaaaatagtaacctgaattcctgaaagaaaccattgcgtaaactaaatgacttactacaattcatcatgccctgttgaaactactctccaactgatttcctcccgctggaaagtgctcatcctccgcgatctgctcgaaggcacccggcggtttggagaactccgcaaatccattgggcctgtgacgcagaaagttctgaccgcgaacctgcgttctatggaaaaggacggcctgcttacgcgaaaggtgtatgcggaagtacctccgcgcgtggaatatactcttacggaactggggcgcagtctgcgtcccatcctggcctccatggcggaatggggatcgaaataccaaagagaaaaccgctgatcctcccctccctttccggagcttaaccgaacctccggaaagacatggaaatacagcggtttccctttttcccgcaagaaaggtcaacgggaaatttccgtcgttttacggataatttcacgggctttccgcacgtcttcctcatgggaattcccgcggcttttttccacggtaaagagcttggaaagctcttcatccatgcgggctacggcagctttcgccttaggattttttgcggcgcgggcgcgcaggatattgaccttttcaaattcctccagtccgtcccggagtttttcaaaccgcagggaactgagattgccgggataaacaaggtagcagtctcccgcgggccagttcccgaaatccgtcttttcaaacggattgcggttccaggaattataagcccatctcaaaaagccgtccaaatgattggcggcggcaaagaggggaagccattccgcctccgccagcggggaaatagtgaaggtgttgggctttttgggatggacacagacgtagaacgtcgtcttttttccctcctttttgcgctgcgccagcagatcgcccgtgaccgtgcctgcatggtcaattacaggagagacgtcataaacgtcccgggtcatggccgtaggccgattgacggcggaaacgattttgaattccggggcatacttgtccagcacattcttggccgccctgaccatagcgtccggccgttcatccagcccgatgcaggttttgcccagccagcccttgctcttgacgtgtttgcgaaaatccgtcaggaaaggcccccagatagcttcataggagggatcgttcggcttaagatccagaaatttgtactttccggtcgcctcatccagataacggattttcatgttccagggaatcatggtatagcaggatatctgccccttgacgcccacctcgttcatcatgaaggaaacccacttgtcaaaattggcgtaattccagcgcatggttccgtttttgcccttgacccattcaatcatgggcgggaaccagtcataagtctgggcattccaggcttcatcaatcagggagcatgtaatggccttttgcccggcatccgccagccttttcatcaccggcttcatcagcgcgaaatgctccggagaccacggttccacatcatgccagcgggccacggcctgcggatgctgccacaagtccagatgaacttgccaatgcgcgggagcagggagggattccggcgccacctccagaattaccggcacactgacgggagagccgctttctgcggaaactaccacttttcctttgtacacgccgggtttggcagacgggggaatattgacctccacccataccggacgcacgcctccggcttgcaaatcgcagctgttttcgctgccgatgatatctgaaatcagcctgttgccccccctggtgtagcgtatcatggcagtccggacaggaataatctgtccggcagcgttttttaccccggcgcaggaggccgataactggggctgcgcctgggaagaccagacggcaatctgcccgccggcgcgttcgcctctccagccgaacagacgcacggcatcctgaagcatttcctgcccgggagcgccgttgtaaggaatacggtcataatccttcaccgctgcagcctgcaggctcagggcggcatcgggtccgtaccctttgatttccaccagatgtccccccttttcattgccggcgctattgcctaaaaaagtgattttaacgtaacggaccgtctgcggattgaatttgaagggaacgccttccggagtggcggcaatgctgttggaagactgatccgccaacattttccagttttttccgtcttcggaaccttctattttatatttgtaaatgcgccctccctcccaatagggccatacatgcaaggcggaaagcgtccggggctttcccatatctatctggagccaaacgggaatgccctcgcaaccccagtatttgccggcgttattcgtctgcccgtccacggccagttccggacggtcactgccgtaatgaccggaagcggttactttggccccggcaaataaattacctgcatcacccggagttcctgcggaaacaagggcgggttcatacaggggatgcctttccagggactgggcctggacaaaagacgttaaggcaataacggaacatagaggaaaaaaaagacagcgcatacgcatattacgcgccggaatttcattttctctcaaaagaaaagctgtttccgctactccgccaaaggacgtacgggtattcctctggaagcaaagtaagccttggcttccggcaccatgtattccccgaaatggaaaatggaagccgccagcacggcatccgccttcccttccaccagcacgtccaccatgtgatccaaattacccgcacccccgctggcgattaccggaatgcgcaccgcactgcttacggcgcgggtcaactcaatatcataacccgttttggctccgtccgcatccatgctggtcaacaagatttctccggctccgcggcgttccgcctccacagcccattccacggcatccagccccacgaacttccggcctccatgggtggaaacgccccacctgccggaagcctggcgcttggcgtcaatagcgacgacgatgcactggctgccgaaagccgccgcaccttcattaatcagctccggcctattgatggccgccgtatttagggaaaccttgtccgcacccgccagaagcatttcgcgcatgtcctttacggaacggatgccgccgcctaccgtcagcggcatgaagcaacatgccgccgtgcggcgcaccacgtccgccatggtggcacggccatcggaagaagcggtaatatccagaaaaacaagttcatccgcctgctgggcatcatacgccctggcacattctacaggatccccggcatctctcagattaatgaaattggtccccttgacgaccctgccgtccgttacgtccagacacggaatgattcttttagccagcacagccctatcaagccatcaccgccgccaaaggaaaagcctaaaatacggcttgccgcgggatgccttttaataaacatgttccctttttgaccaaggccctcttcggcagcgtttccatcccgcatatccatggtaagagaaatttactgaaattcatcaatatcactattccactcactttccggccggccctgccccgccatgaagcaacgcagtgcggcatctgcccctttcccgcccgcatgcataaaacggcctaagagcttttctttccatgtccaggtggtagagtccgcataaggcatttccattcatgaccaccacacgctcgggattcaccaaacttgcagccgtctgcattgccattcttctgggggcggtggtctgggagctggggtggcccctgacgcgggcggaacatgagtggtcgcggctgattgcagccgttgccacgctgggccacctgacgggcattctgggttcctatttccggaaggaaatcaaccgcccttccctgaggctcctgattttccaaatcatcagctgcctcatgatttttctcctgattgccagggaacaacaggaagcgggatacatgaggttcacggagctttcccgcctggtgattacggccgggctgattgccatccccacgctgatgtccctgaccaggatttttgaatggctggtgggcaagcaaaaaaaaggccggcctcttatggcccccgccatgcagtttgtagcttctctgggagtagtcatcctggcaggcaccggattgcttctgctgcctaattccacatatccgggtattacactcagttttacggatgccctgttcaccagcaccagcgcagtatgcgtcaccggtctgaacgccgtggattttgcccatacttttaccccgctgggagaaatgttcacgcttgcccttatccagattggcggattcggcatcatgacgttcgcctacttcgtagccatggtggcaggccagggtttttccctgagggaccgcgtgctgctgacggatctgcttgatgaagacaatctgggagccgtcgtctcctttatcaccactattgtggtcagtacgctgttcatcgaactgtgcggcgccgtccttctttatttctcctgggaagggaaggacatcaacctgatgggggagcctttgtggtggcattccctgttccactccgtttccgccttctgcaatgctggtttttcaactttcccgatgaatttgatggagccgggcatccgcctgtgctacagcgggcaggcggtcatcatggcgctgatcgtatgcggcggcctgggattcggcatctacaaggaaatcaattcacgcctggcaaaccgcttcttttccaaacaccgccgcctgcacatgcagtggaccccttatttcaaactggtgatgatctccacggggattttgctggcgggaggcgctctggccatctttgccgtttcctctccccatgccgcggaaccgttgggggaacacctctggatttgccttttcgacagcgtcacggcacgcacggcgggattcaatatcagcgactacagccgctatctgcccgcagccagcctcattatgtgcggtctgatgatggtgggaggcagccccggcggcacggcaggcggcatgagaaccactacctgcgccattgcaggcgcggaaatcctgcgcatcctccgcggcagggatcatgtggaatttttccgccgccgcatcgaccagcgcaccgtggcgcgctgcgtgattaccgtggtggtctcctgcgcctggatcggctgctttaccgtcctgatttgcgccctggagccctccatgagctctctggatatcttctttgaaaactgcagcgcttttgctacggtaggcgtgtcgcggggcattactccagatttaagcgacccttccaaataccttcttatcgtcaacatgctcgccggccgcgtggggcttttcgcttttctcattgcgctggccggcacccctactccgagacattaccgctatccatccgtcaaaatcccgttaacctgaatataccatgatgagatacaccgttatcggcctgggccagtttggacaggaactctgcacagaactttccgcccgtaatattgaagtagtagccgttgcctccacagatgaagaattggagcaaatcaaggatctggtgacttatgccgtggtgacggattacactaatccggccgctttgcgtgagttggaactggacgaccagtccgccgtcattgtcgccatcggagacagttttgaagaaaaccttctcgtcgtcacgcaccttcagaaaatgggcgtccgctacatctacgcccgcgtcatgagtccggtgcacgaacacattttaagccagatgaacgtatatgcgctcatcaacttatcccgcgtagcttccaagcagctcgccagccagttggaatccccggaattcctgcgcgtctcccccatggacgaaaaccacagcatcgtggaaattgccgtgccgcgcatctgggtgggcaagcgcctgcgggatgtgggcctgcgcacggaacaccacctcaacctgctcaccatccgccgcggggaggcccagactccgcaggggcgccgggaaatcctgtccataccgcgcattcccgtcattggcactccttccccggatctcgtttttgaagaccatgacattctggtcctgttcggcaaggaaaccaatttgattgaattcgcccaattatccaagggattgtaaaccatcctccgcaagcaggctgagggtatccctctccatttcagaaaaaggcgacggataagccgcctgtgtaaacagcctccgtcctggttttactggcttgacaatgcctcaaaagaagccaccagacgtttttcggagacgcggcccttgacggagatggcgggagcgaaaatggccaggcggtattcttccagcaaataaccgtattgtatccagcgcaggtctccggcatgttccttcaaaacctgatgccagggaaaatacacgcgttcaaagagatccaagcgttccaattccctggcaaggggttgctggccgatgcgtctgatacgctccgcaattccctgcatgtaccgtttcaggtccggcaagcgttccgctccatgcgcccacaggaaacgggggcgtaacaaccagtcaagctggcgctgaaggtcagccgtaatgcgctccgtatggcgcacacccttttgcagcgccgtaaagtccctgacggcatgttccgtacccgccaccagttcccatatatccgccacgttatgcgccgcgtcaaaaaggttttggcgcagattcatttccgcagcagcgaattgctccgccgtgcgcggcaaaggacggcccatggctatctccgcggcaacgtccaccaggtcttccgcattggtagacggctcccgtccgagcatatgaagagagagctttccttccagcttcaacggaaattttctgcggagatggttaagctgatccgtctggcgcaggcgcatgaaacgcaggcacccctcccggtgggattccgcagcatccagttcatcctcaaagacacggacgcccacggatgctccttcatccaccagagccacataacccggccttcccgccacatccaccgtgtattccaaatctccgcagctccattccttcatgccggttacggacacgatatcctccgctgtttcctggaaccgacgggaaagttttttacccaggcggttattcagttccgcaacatccgtgcccatggcaagctcttccccttcatcatcgcacacccatattttcgtaaccagctccgcaggaagacggttcatgtcaaaaaaggagggcgcgcaaaattttcccgtttccacttccacaaattccgccagtttccccgccagcggcccgtccggttccaggccatgcctcagttccgcaaagtaagcggccttttggctgataggctggagaaagacgcgcaaatccttgggaagggaacgcagcaggcattccgcccgctgggccagatggccgggaaccccccactccggcaaccattcgggaatatccggcaactggtcgatgtggacgcccagggtcacgccgtcatcctccgcgccgggatcattctggtaatacacggcatattccgctcctttacaggtgatttcatccggaaaaccatccagcaggtctttcccccagaattcgtacatggcttcctgtggcggaacatgcagagcttccggatttttcttctccacaccggcggcccaccgcaaaaaggccctggccgtacagcagtccgggggaacaagcctgttaaagaattcaaaaactccttcctcacaccagacctggtccggacggcgcaacttcagctctatctgccgaacatcttcccggagcgtttccagatgcctgatacaggcgggtttcgtgcggaaaccaccgcccaacaggccttcacgtatcattatttcccgcgcatgggcgggattgatacggccatagtgcacacgcctgttatcaatgatgcgcaagccgccgcacacgacgcgttccactgcgtaaacagccccctgctccctgtcccaccgcgctccggaatagtgtgattcgcacagatggggcgctactctctccacccattccggttccaaaatggaggcgcggcgcatccacaggcgcgtggtgtccaccaactccacgcccattacccattcactcctttttttacggcggaacaggccggaaccgggaaaaatgccgaaggaacgtcctccggcgccgcgatattcccggttgtctgcatcccagaggccgaactggcgcggaacgcccgccaggatgctccggtgaatcatggcaaaggaagcctgccgctccgttttttcttccaaaggggaaattttgcatttcagtgtttccctgaccaaccgggaaagatcctcccataaattgaaccattccatcatgcggttgaaattgaggaaatttttcccgcaccatttccgaagctggtttttgcgccagcgccttccctcccggaattgccatgcagccttccataatttaagcagagacaggaagtcactgtcttcttccttccactgcgcgtgggcctggtccgctttctgagcggcatccgcagggcgttcacggggatccatgatgcccaggccggctacaatcaccagcatttccggcagggcctgttcatgttgagcctccagcaacatgcgggccagccgcgggtcaatgggcaaccgcgccagctttctgcctacgggcgtgagttgccgggctttgtccagagcgccgatctcccgtaaggtgcggtaaccttccgtcaccagtttggatgaaggaggatccggaagcgggaactccggcatttccggcaatcccaggtctttcatccggagcagcgccccggccagtgcgctgcgcctgatttccggatccgtaaattccggcctgtcctcccagtccttctcactgtacaggcggatgcacacaccttcgcacacacggccgcaacggccagcgcgctggcgggcactggccttggagacgggttctatctgaagccgctgcacttgacgtgccgggctatagcggctgacgcgcgccaggccggagtcaataacataaatgatgccggggattgtcagggacgtttccgccacatttgtagccagcacgatgcggcggtatccctgctccggatgaaaaatcctttgctggtccgccaggcccagcctggcgaacaaaggcagaatgcacgtatttctcagattccggcctttcagtttttccgccacctcacgtatttcgcgttctccgggaaggaagacaagcacatccccgcgatcgtccagagtatccagccaatccacggcacgcgccacatgagccggaagttcctcatcgtcatgcagcggcggcagatagtggagatccaccggataagtgcggccttctacttgaataataggcgcgcctccaaagaattcggaaaacccaccggcatccagcgtcgcggaactgatgaccagccgcaagtctctccgcctgcccagcaaaagacgcagatagccaagcagaaaatcaatgttgaggctgcgttcatgcgcctcatccaaaatcagggtatgatattggcgcagatccggatcatgctgcgtttccgccagaagaatcccatccgtcatgaacttcaggcgcgtatccggcccggctttttcctcaaagcgcacctggtaacccaccaaacctcccaggtcgcagttcaattcttccgcaactcggcgggaaacggaagcagcagccagccttctgggctgggtgcaccctactctgccccgcgcctccccggcaagctccatggccattttagggagctgggtagtcttaccggatcccgtctcccccactacgacaatgacctggtgctcccgcattgccgccagaatgtcattccggcggcgggaaatgggtagatccggataagtaatgttcatggtgaagatgagaaaaaaaccctgcaagaacgtcctgcagggttgaagaagaaaaccgggaggttcttttactgacagggtttgggaagggcgatacggccgctccgggtcagcatctgcacatcataatcctcaatgagggacaggaaacggtctatcttgtactcgcctcccgtcacttcaatggtcagggcgtcccgcgtgacatccacaatgtgggcgcccagtatctggcagaactcaatgacttcatgccgcgtggcggaatctacgccaatgcgggtcaataccgtttcccggtacacattgtccgtattgcggaaatctactacttccaccgtgttgaccagtttttccagatgcttgataatctggtccagaacatcctccttttcgcgtacgacgatggtcatccgtgaaaagcgcgggtcctggctaggggcaacgttcaacgaatgaatattgtagccccgtccactaaacaaaccggcaatgcgggcaagcacgccaaatttgttttcaacaagtacggagatagtatgacgagtcataatttaatttcttaaaggtgatgcattgtaagcacttttgactgccagtcaagcctgcggacggcgatgccggaaaacgtttttcctaacggaggttccggcaggaaccgctcaggccggatcaaagctcgtgcggtatgatggcgttgccttttgtcgcctccggaatgcggggaagcaatgttttttcagaaacggggcgcgcatccactttcacattgaattgctgcccgtcgcgggaaacggtcagcaatgccggcccttccctaagagctttgaccaaggcttccttggtactgacactctggtggtttacggcaaagaccatgtcgccggcctgcaatatctgccctacggatttcttcggattcacttgaatgaccagcaacccccgagcacctatggattgttcttccgcagtcagttcacgcaaatgcattcccactccttccatgaagtcttcccaaggagaaggaacattttttaaaatactatctcccaccttcagggtgacgttcattttctgccctttgcgccagactttcagccagaacttgtcgccgatggaaagattttcaatgcgttccttcacttcctcatccgtctggatggggacttcgttaaaactcagtattacgtcacctgtttgaaggcctgcctgctccgccggggaaccatgcttcacgatgttgattactgcgcctcccgcctcatgataatccaggaagctgcgaagcgggggagtattgcgcacaatgtccaatcccagataccctttcatggggcggccatgtttgcaaatctgctcaaagctgtgcatcaccagattggagggaatggcaaacccaatgccggcgtaatttttctccgcattgggaagcaccgatttattgatgccgatgatttccccgcggatgttgatgagagggcctcccgaattccccgggaagatactggcatccgtctggatcaagttaatgccggaatccaccagcttgcgttcacgggcactgataatgccgcgggaaacagtcgtgcccagcccatagggattgccgcatgccagaacaatcatgccgggcgcaatttcatcactgttgccgaacggaagaggggtaaacgtcatcgggttttctacctgcagcacggcaatatccagttccggatccacccctaccaggcgtacggaaacgcttttcccattgctcagcgtaacgcgcagcgcatgcttgttctgaatgacatggtaggcggtaataatatgcccttcttcagtaacaatgacgccggaacccaaaccatgaaccgtcagcctcttttcaatcatgaaatcaccatcctcggaaggctgaggaacgcttgtcacgcctgtagtgtctatgctgaccaatacccgttccaccagccgggcaacgcgtgaatattcctcattgagctggtgcaaaacaggaatatcctcctccttcaattcgggctgttgggccagggtaaacacttccgaccggaaggaaacattcttctccgtaacacgactgttccatctccaataggcaacggagaccacggtcatcataaccgtcatcatgatgacaagtaaagcccgtgtccatatggtcgatctcatggaaatgccctgccgtaataacgatcaaacggtttgcggcttgatcacaaggagatgcctgaaaacggagcctgtcaagcttcagccgctttttgacattccggttccattgatactatttaagtactttctcttcaaatgaaaaaactttcaaatgacaaatacgcctttcaacaaggcgtgctttatgatatcatgcggccacggttttatgggttccagcactttacaacaacaggccattcatctcgtcttcggtacggatgaaggaatggtgcgtgaaaaggcttccggcatctttgccgctctgacggaaggcacaaacgaattttcccatgaaattctggaagcggcctgcggtgattccgatgaagcggcccagctggtacgccaggttatggaagctctgcggaccctcccgttttttccggggcgcaaagtagtctggatgaagaactgcaattttctgggagactccgtcacggggcgttcctccaccacggaagcggctctggattctttcaggcaattgctggaaagcggcctggggccggacgtcctgctgcttatttccgcctccgaatttgacaaacgccgttcctttaacaaattcctgcttcaatacgccgcatcggaagaattgaacaagccggacatcacgaaagcaggctgggaaggcagtttaatgcccctcattaataaggaaacggcggcgcgcggcatgaatttcgactccgccgccctggaactgtttattcaccgcgtcagcgaatcctcccgccaaatcatttccgaaattgaaaaactggatctttatctgggagcggacagacgcaccgtaatgccggaggatgtggagcgcatggttccgctgacgcgtacaggcgttatttttgaaatttcccgggctttggaaaacaagaaaagcgatgcggccatctctctaattgattttcaactggaacgcggtgaaaacgccatcaccatcatgcgtgccgcattcatccctacgttaagaaatttgctggctgccagacttttatgtgacgcattcaacctgaagcccaccaatttcaaggaatttacggcccgcatttcttccctgccctcctatgcggccgcgttaattcccttgaaaaaagacggtacacccaatgcgtatccgctttttctggcggcgcaaaatgcttccaaattcaagacggaacggctaaagcaaactttgaaagaatgcatgaaggcggataaagccctggtgtcctcctctcttgatccccgcctgattctgcatcgtcttgctatctgctccgcatcctgatgaactcctccccttcttccgttttccccctgtttgacgttctcgtcgtcggcgccgggcacgcaggcattgaggcggcactggcagcatcccgtctggggtgctccgtcgccgtcctaactcataacctggatactatcggacaaatgtcctgcaatccggctattgggggacttgccaaagggcatatcgtccgggaaatagatgccatggggggagcgatggggttgaacacggatgctaccgccattcaattccggatgctgaatgcctccaaggggcccagcgtgcgcgctccccgcgcccagtgcgataaaacagcctaccgcacaagaatgaaaatggttctggaaaccgcccccggcatacgcctgtttcagggagatgtggtcaaactgctcgtcaatggagaacagcaggcaacgggagccgttacttctctgggatgcgccatccatgcccgcagcgtgattatctgctccgggacattcatgaagggattgcttcatgtgggccttcaacacataacaggaggccgaatgggttgcgcttcttccagcctttccgccgatcttgccatgctgggttttcaggtggaaaggcttaaaacaggaacttctccccgcgtcaatgggagatccatcgacttttccgtctgcgaaatacagcctggagactctccggaagccctgttcagctaccgttcccgtgatatactgaaacgtgattccgaacccttttgcactttgaacacgtggggagatgaaaatttccggatgaagcaaatgccgtgctggatcacctacaccaaccagactacgcacgacattatccggaagaatttaaaattcagccccctttacagcggtatcattgaaggcgtaggcccccggtattgtccttccatagaagataaaatcgtgcgttttgcggaaaaaaacagccatcaggtattcctggaaccggaaggccgcagtacggaggaattctaccttaacggagtttctacttcactgccctactccgctcagtgcgacttcatccataccattcccggcctggaaaacgcgcagctgatccgtccgggatatgcggtggaatacgacttctgtcctcccacgcaattgcatcctacgctggaaacaaaactggtagaaaacctgtactttgcaggtcaaatcaacggcacttccggctatgaagaagccgcagcgcaaggactaatggcgggagcgaacgccgctctgaaaaccctgggcaaaccttctctggtgctgcgccgggatcaggcttacatcggcgtcatgatagacgacctcgttaccaaaggaaccgatgaaccttaccgcatgtttaccagccgggcagaattccgcctgttgctgcgtcaggataatgcagacctgcggttggcccctctggcttttgaagcgggccttattacctgtgaaatggcccggaaggctgaagacaggaaaaacgccgttgaagaaggaataataaaagctgccgcgcttaaacatgaaggagtttctctctccacatggcttaaaaggcccggcaatgactggactctattgcctgaagaactgaaaaaaatgttccacgtggaacatttggatgccattgctacggatatccagtacgaagggcatattgaaaggcagaaaaaacaggcggaaaaaatcatacggatggaaaataaaactattccctccgatattgattacgaacatgtccatgccttaaaaaaagaggctgtcatcaagctgggcaacatacgtcctgcaactatcgggcaggcctctcgaattcccggaattaccccggcagatatcgccctgttgcttgtgcatctgcaaaaacgcagcaggcaacaaacataataccccgcgttttttattcagaaatttcaatttaaggaggaccataggaggcgggtattgaaaaataaatatggcagggacatccttgagccgtatatgatcccattatatttccctgtcgccattgcctggagtcgataaaaagattcaatactgttttctgaatgtctttttgcgcgacagcagctcttcccttcctccgaacaaccaccactttctgcttgtcgtaaaaagaaatggaatatcccttcagtattattgaataccggccttcctgatttatccatcgcaaatcattaagaagcgtcacacgatttcttcacggattccattcaaatactgccgataagaaaaagcagcattgagcttactccaagaggcaagggaggccggaagggctgaatgacaaatccaccgggcgaatgaaaattaccttcccaagtttaaaattcttcggataaccaataaacaaagacctcatccattaccggtaacagatatctccccggatacatacatcatctccaaaaatatttacaacaggttgttcaagatgggcttcatgctccagaaacggaccgggcgctacgccgtccgtaccgccgccgataatgatgggagcataaaaccccacccactcgtcgactaaaccggctttcagaaattcccggaccagacagcctcccgcttccagcagtatagttcctatttttttattattatataatttttttaataattccaaataattgaaaacattctccacaaccaaagtgcggtcacgaaattcatctgttaaacaaatggaatccgcaggtatggaagaagcatcatgggttagaataatacgccagggttgttccttgaggggagaaacaggacgatccggtttcctaatggtcagggacggattgtccagacgcacggtattccctccggtaagaaccgcatcgcattcggcacgcaaggtatgtacaaaagatctggatttttcattcgtcagccattgggaacgttccggactacgggaaatgcggccatccagagacatggcgctttttgcaattacccagggacgcccttccagcatgttcaccctgaaccccctgattaaatgatcgcattccttctccagaaccccgcgggtaaccttgatgccggcctgttcaagaatatcagccgcagcgccgcggtgtttgggattaggatcttccgaaccataaaccacccgtttaaaacgatgtttcaaaatggcatccgtacaaggcggtgttttcccggaagtactgcatggttccagagtaacatacaaagttgagtccgcgaacaggggggcattgccattcgccactccgtcggcaatagcctctctttccgcatgaggcaagccggcttttttatgaaatcccgaaccaatcacctggttttcatgcacaatgactgcccccacgcagggattcggactcgtaagtccgattccatttgaggccagttttatggccatgttcatccaacagtcatcctgatttttcgtattcacgccgttttgtagcatgaaaaccggaagaaggacaatcacgttgtgtgattgaagaatattaggtttaacaatattaaattccttcttcttctgctgtgtgcccagtgtgaataagattttaaatgactgtaaatgagagtattgagtatcatttcaaatgttaataaatttggcctgcaaatttgtgaataatatctgaataagttattcacatcatactcacagttaatcaacctggcctttcacaaggttattggcaggtgcggctgtaaacagaaacggcattcctgcttgcagaaaacccggaggaaagcataccatccttttgtgaaggctgccagattgatttacattccggagagggatcatacttttcccgctacaagccctgaaaggcccttctacggcttttccgtggctggaatgaatatagccgcttactgtgcttcccgccttcgggaagtgggctttgaagcggtttttgacccgggaacgccggtttcagaagaaaaaggggaaatcatagaagtgtccatgcatgatttttccccggaggcggccatatggcttgccttttgcggggcaggggaagcaaggtgtgaagaagggcatttgctggcccggaaaagcggggaaaacgggttgacgcgggtattcacgcggaaggaagcagcgatagagcgcctcgtttatccctgggatcttctggaatggcaggaaagagtgatggagaagatggagtgggaggatttctccggaagggaaggggtttatgtcatgggaacgctccgggtaggggaaggaaccgtcatcatgcccggcgtggttgtagagggagccgtatgggcgggtgatggctgccgcatagggcctaattgccatttaagggggtgtgtatctttggggaatggctgtgtagtagggcagggagtggagctgaaaaattgtgtcatcggcgacggcacatttattcctcatttgagttatgcgggggattccattattggcagtgacgttaatttcggcgccggaacggtatgttccaattttcgccatgatggcggcgaacacagaatggtggcgggaggaaagctggaatttactggaagaaacaagcttggcgctgtcattggagaccatgttcggctgggtgccaataccgtcgttttgccggggcgggttcttcctcccggtgcttggaccaggccgggggaagtcttcacgggggcatgaatcggggaaaggaattttcttaatactgaaaaggccgcatgcggaaaaacgtcttcccgcatgcggcctttggctaatggttaaagttgcttcagcagcaccggcggcggcgcatcatcagggcggccagccccaacaggcccagggaagctgtagctgcttccggcacgggaagcacgacaccgtcataaaatttgacgttgttgatatccatagtgccgttcatggggcgggtatttccaaaagaagctccaaactgggagcctgtcagggcaggggaggatggattccacccggtaatcgtacctgccagagcgccgttgacatacacggaaagcgtttgggaggaaagatcggaaacgatgctcagattagtccagctgtcctgctggagatccgtccaggtcaatcccgtattgatattcccgccagtttggccgccgaaccccttattgtagaggtagagttctccgttattagtgaatcccagcaccatgctgttggattctccggagaccgttccattggtgtacaggctgaaaatgtctttccacccattgctggtggaactcaggtttttcaggtcaaagctcacggtgaaactgccttggatacccgttatgtttgagttatagggagtgccggaattgctgccgaacgtggcgtaatcattgccggaagtgtaattgaaggaaccgttccagttgggggcggttatttgtgctccttccgcagttcattcccaggaatagataggggtagccgcatggaccatgcctgccgctgccagtaaagataaaataataaatgagcgtttcacggaaattctgaaatatgggttaaaatcaatccgataggagggtagcggattataaatccggggtcaaattatttttctgaaaacaaatcatttaacggaaaaaagattacggagaagataaaagaagagaaaacagaaacggcattcctgttggaaagaaaacgtacatttccaataaaattaccgcatcctgggaaaaaagagacaatatccggatttataatccgcacaaggatattgaagaaatctgattctctggaatggatttttaagaatgcttaaataatttgaaaaaccttttcatgcaagatatgcccggagaaattgtatattactatatatagtatgcttttaaaaaaatactgccaaatattagggtttgacggagaaatggcttgaaccatgaaaggcacttatgagaagatgcgaggcagataaaagcacagacacatgaagtttaccatttccaagcaagtatttctcgacgggctgagacaggttgccagcgtcgtgtcttccaagacgacgctgcccattctttccaatgtcaagattgaagctgaaaacggccagatacgttttacggctactgatcttgatgtatgcattactggcgtggttcccgcaaatgtgctgcgtgaaggcaccgtgaccctgcccgctaaaaagctggtgagcatcatcagcgaacttcctgaagccgaagtccaggtggatgtcaaccaacgcaaccaggctgctgtggaatgcggccgctcccagtttaaactgaacggccttccggcggatgaatttccggaactgccgtcttttgagcaggctactgtgtaccaggtggagcagaatatgttgcgcgactgtatccgccggacggaatatgccatttccacggatacgacccgctacgtgttgaacggcatttccctttctttccgcaatggtaaaatgactttggtagccacggacggacgtcgtttggctttggcggaaaccgccctggaatttccggaagaacagcaactggatgccatcctgcccactaaggctgtcggagaactccgccgccttctggatgaagtgggaaccgtcacgatccggttcacacgcaaccaggcagcctttgaaatcaacgatacgctcttaatcagcaaactgattgacggcaattacccgaactaccggcaggtaattcctacggattgcaaggaaagtatcgaacttccctgcggggaactgctggaaacagtgcgccgtgtttctctcctttccgtggataaaagcacaaatatcaagctgaattttcgtgaaaacgaactggaagtggcttccagcgcagaaggagtgggcgaagctcatgaatcgatgacgatcacttattccggaaggccgctttccatttcctttaatccggatttcttcatggctcccctgaagacgatggccggggatacggtcattacgctgaacctcattgatgaaatgagtccgggcgtcttgaagattggcgatgagttcctgtatgtgctcatgccgatgagatctcccaattgattttggtggcacaaaatcgttcatacagaggaacaggcgtcgtggagacatgacgcctgtttttttattggctgagagtgaatggaaaagaaatgttattcacataaatgttctacgtggaacattttttattttccattacaggaaaactgtaatctgccttgaaaagacggaacacctgcatggggcgcgaggggcatcaccggaaacctctgcgacgacgggagaatgccattatccgggaatgagaagatgcggggacagcaaatattcagagcggagaattgacaaattttactccgtatcactcgcccagcagacccggaggagcgaacaagtccggagcaagatgaaagggataaaaaccggatgcttgaagaatggcttcacggacggaggatatggaattgaaacaggaatgttccacatccagaatacgtccgtccttcagtttaatcatcaatccgggttctgcctcattatttggtgtgcatcctatgcgttcaattaattcccacggtatttccctgcgtgaaatgctgttgccccagaagatggaagaagaagtgattgtgagaaaataaggcctgcccataataacgggaagccacaggaacagtaaaagggcgccgagaagaaagttccaccagccggaaccgaaaaaagcccaggccaggctgcatcccagggttccgaggattctccctcccagccgataactgcggtaaaaataataagtgttcatgagttgcgaagtcaatgaaacgtcaaaccgaccatggaataataagttcccgaccgtattctataagctaccgctttatcccggcaaagacaagatgataagtcaggaaatccagttcagcatgtcaggcggtacggaaccgcaggaacgtatcagggaaagaaaatgctcttccatttccggcggcggaggaaaaaggccaggcaaaactcggccttcggcaagttccagagctccctggttatgaagagccaggggcggatcaatgtaacgcatttgcgtagggtccgacagaataaaattaagagggcggccttcgttcagcaggcggtttttcggaatttccggcccccattcatcctccacacccatattggcaagcagaacgccggaagagaaaagcatggccgggtcaataagtcctgacatggcatgccgctttcccgtagccgtaacggcgcagaaagcatgcctgattgcgtcagtaagggtttccctgtccgttgccggcacaaaagaggcggaagccagaggttttttttccacgtccgctacaatgacattcagtttccgtctgagagcatgcagagctattccacggccaacttttccatgtccaatgactaccagagtctgtccctgttcattttttattccaagagattccagagcccggaaaaaactttctccggttccaaggcaggtttctatctgtttaatctttccggcgtccaccatccacacgggctgcgtgcatgccgcatagcgttccgcacccgagcgggttaattccacatacccgcagcggctgggaacatggctgagcgctccggcgcagtccatgaccacatcataaggtccgcctgcccgttccgcttccaccacgggaatcccatattgtcccaataatacggctgtttccgagtcatagggcattaccggggagaccgctactgtcagctccgctcctgcggccagaagagaggcgtatttggcgcaggtattccggaacacgggagaagcgtcaataatccggcatccttccagagggcgactttccgaccacattttatactggtgcaggagaacgggaaattcttcctgccgataaaaggggaacaaattttccagaatgcgctccggagatgcaggcataacaaaaatcttagggtttctcgcagcagagggtaatccctatcctgtcgttttcccagaaaaactttgttaaagaaatatcttttgtttaataatttttaaaagctgtagccagttcagggaagacaaagtgctaagtcatctatattcgcttgcaagtattttatgcgcgtgtcgtggcatgcctgagaacaatctttttaactgcattcttcacctgtttgatgcagaagtgttttctttttgcgtagaataaataggacagcaactgttaatatggtcaacatttccgacagacaaagtgctagccacgcaccgttcgttcccattgcttcaggcaacaggataaagcatggaataagaaaaacaaatcctcgcaacagggcaaacaaattggcgagttttacattttccacgctttggtaataaccgatgagcatcaggttgatgatgaagaaaacaaatgccagggagaaatatggaaatccctcaatggctatgagcgccgcagtgctgtccggattgacgaacaagcctaccagaatatgcgggaacaaaatgaatgctgccgtcgtgactatgccgcaaacaacggaggtaaataatgcgatccgttttgtatcggctacgcgttttttctctccaagcccgaagttatagctgatgatgggttgcgctgattgcgctatggcattgcctaccatgaatacgaacggaagataatagtaggcaatgccgaacgctcctactccattatctcccagatatttcatcaatgtgtggttcccgacgaacatgagcgtggccagtgtcgcttcagtcagcaaagcggaagaaccgatgcgacattgacagacaatattaaggagggagaaccgaaaacttctgatgctccatttaataggataaagccgcagtttatgtgcaaatttccataaataaataaggcccgtggcgccgctcgcaaacagtgctatggttgcggcgaaagcagctcccgtcaatccccagcccaatggaaagataaacagccaaccgagtattacggtgatgattgcagcaatgatattgcacatcatagccaacttcggagcgccatccaaacgaatcatgaataggcagacagagcaccacatctggaatatcaacgaggggatgaaccacaacaggtattccctaaccatgggggtaagatgttcggaagcgcctaaaaatcgggctgtagctgacggatatgccatcatcaaggcagatggcacgatggcggcaatggtgacgaacaacaaggcctgagtgacattaaggcgcgctgcccccagttttccttttgatagctgaatggaagcgactacggatgagcctacgcctgccatgagccctatcccggtaaacagcatcagcaggggaatgcatatattgatagcggcaatgccatcgcttccgattccgtggccgacgagtattccgtctactgccgttactgccgatatgctaagcatcccgaataaggtcgggataaaatactttctgaataatgtgcatacgtccagtgtgcctaaatcaattgcatttcttttcatatgtgtctgttattcttatggctattttttgccgggaaacaaaaaatgccggataaggtgattggttttacccagtcatcttatccggcatttttatttgccctccgatgaggattacaaaacgcttcttttcgttgtgtggccgtaaaaatagtgcaataatttaggaaatataatttttttatacgtcatgttaatgccttggaaaaaatgggatagaaaaaagactgctttccgggcagtctttttaaaacagtttgtgttttgaagggagcgttttcccggcaggctattgtttgcggcctccggattcctgttgttgtgcgggagggattttctgcgcttccggcacggggagcggcgttttctggatggtaacgggcgttcctatgctggtttgcctgtagaggatttccgcaacatttcgcggcaaacggacgcagccatgggaaacaggatgccgccgaactttccctacatgcaggcccaaccccgcgttggtaagacgctgccaataaggcatgggagagccgtcaaaacgacctccctccggtatgggatccgtggattcggcattgtagttgatgcatttgccttcggcatcatacattttgccgtagaggttggaagcatggtcttcctttttggagataacggcgtagtcccccgttttggtcggataggcttttacgccggaggagagggggaagtccatggcgaccaagccgtccaccagatactggccccgttgttcgtccaggcagacgaagatttttcgggattttttcggctggcggttcagcaaggtatcgtccttgtagacgtcgtacgttttccggtagtccttgcgggctacaaaatgagcgtatgtggaaggatgaaacgggtttttatattccggaacggatttgtccacggcacgcggatccggcagggccgcatgacccgtgccggagtgggaacaggacgcccaccccatgagcaccacggggaaggcggccagaacaaggagaggcttcataagtggtggaaccgggaggatcccccggattacttggaacgcggaatcgtcaacttctggttgatgtgaatcagatcggacttaaggccgttagcccttttaagggccttgacagaggtgccgttcctgcgggcgatggctcccagcgtatcgcctttcttcacggtgtaggtgcgggccttgggagcggatttacgggaggagctctttctggcagccgtgctgcgggaggatttgctgccggccgtgctcttccgcgcggatgattttttagtgacggaaggcttggcggggggattgtaagcgtagctggaagaactctgaaccgggctgtaatggccggattcgtaagcgggatcagagctttccgcgatccacggcgggatttcgccgctggccggttccgcagtgtcgtaaccggccgtggaggaattctgggtggagcaggaagagagggggaataccagcgcggcagcgcaggcgcaggttaaaatgaatggcgttttcatgtgtgccctgttcatactaatttatgatttcggattcaaggcggtagcgcggattgtcgggattttttttcagaccttgcccagattataaaaggtttccgcatttcgggtcgtcacatgggccagatcttccaggttcatgcctctggcagcggcgatgaaacgggctgtatgaatgagatgggcgggttcgttcatgcggccccggaggggttccgggctgagatagggggagtccgtttccagcatgatacggttttccgggcaccagcttgcggtttccgccactacgggggcgtttttaaaagtagccaccccggtgaaggagaccatgccgtccagttcgtcaaagatccgcatggcctgagcggtatttccgatgaagcagtgaaatacgggacgcacgcggcccgcgtagttccgggcaatagccaaggcgtcctcaaagctcgcggaacctttccggtcccgcgtatgcaggacgatattaaggcccaggcgctccgccaggtcaaagtgccgttccagaaggtcctgctgaaggcggtggaattgttccgtttcccagccttggggcgtcccgtggaagtaatccaggcccgtttccccgatggcggccaggggaacgtcctgcgccttccggaaaagctggtccgcccagtctgccggggcgtcatgggcatcgtccggatggatgcccagcgcacaaaaaaccgcgccgggaaactggcgcgcccacgccgtgtttgcctcccagtcatccatccgcgcccccagcgtaatcatgcggtcaatgccttcccggagggcatgctggacgtaagtttccctgcgggactggtcgaattgagcggaagccagatggcagtgcgtgtcaataatcatggtgtaagggactgtggcggaacggatgaagtttgtggatatttgccggctttgaaaagtgcaaacgcagagcatgcctgatttttccttgccacgcggaagtgaaacgcacaaactgccccgcatgaaatgtacggctttgtgcatgtgcgccgccctgctgccggtgggcttcctgcaggcaggaacccagcagatagaagcgccgcaggagggctccgttatcagtttccatttggaaaacgatatgttcgtgggggatgatgataattataccaacggcgtccgctttgcgtggatgtccggcaccacgtcccggagccatacgttttccggcatgctgggaacagtgctgggcggcacgaacgcctcggattcctggcggcggttcatgggcatgaacggttccgccaacctgcgccagcagtggggtttggacctgaaccagctcatgtacaccccggagcagaaggccacctatcccatctacaaccagcacccctatgtgggcaacctgacgctggggctgacctccctagtcaagaatgaagaccgggccaattccctggagctgcagctcggcaccacgggcacgaattccctcgccaagggctcccagcatttcatccataagctgtggggtatggagcaatggcccggctgggccaaccagctccctggagagatgaccgccaatttgtttttcaagcggtattaccgcctgcgcggactggagaagcgctacggctccggttttgaaacggatgccctggcttactggcatgcggacgccggcacagtaaaggtgcaggcggggggcggcatgtccttccgcttcggctataatctgggcaatacttctccggagaacagcattcgcggagcgaccagtgcagcgcctcccttcgtttataacaggatgtccgtttccaattgggggtattacggttatattcatgctgccgtgcgagccgtggctcatgacctgtatctggatggtacggtgtttcgttcctcccccaagtatgtgaacaagtatcccgtagtgggagaatggggttatggcttcggcttccggtacaagcgctcggaattgcttttcggcctgcattacatgaccaaggaatacacccagcaggaatccatgcagtgtgtgggcgttctccagctccggcatactttttaacggctgcgtttgcaggccgttcataaacgcaacagcagcttgcaaagggcaagtttgctgttagaattagaattgcggattcgtatgtaacaggacaatccgtttgtgcatatcaactccgacacatattgatttcatgagaacgaccagatcctggcttttatactgtaccgcactggcggtaagttccgccatgtgcggcctgggagcaccgggcgattccgcccccgcgccagcccccacagggctggaatgggaacaggaacaaaacctgcatttgaataaggaagctccaaccgcctttttcgcgtctttcagcgatttgcagtccgccttgaaagtgctgcctgaaaacagtaaatggcgcaggtccctgaacggtcagtggaagttccactgggcgaaggatccccagagccgcccggccgatttttacaagccggattacgacgtaaaggactggaaggagattaaggtgccttcctcctggcagactcagggttacggcacccccatttattccaatcagccgtatccctttgaacgctcctggccttatgtaatgaaggagccttccaacaagaattatacgtcctacaaggaacggaaccccgtaggttcctaccgccgcacttttgaagtgcctgcggactgggacggcagggaagtgtacatgcagtttgacggagtggattcctttttctacctctggatcaacgggcagtatgtaggtttttccaaagattcccggaatccggcccgttttgacatcagcccctaccttaagaagggggagaacgtggtggccgcagaggtgtaccgccattccgacggagcatatctggaatgccaggatatgttccgcctgtccggcattttccgcaatgtttccatctttgcgctgccgaaagttcacatccgcgactttttcgcacaggccaatccggtggaccaaagggattgggctttgaatattgaccatgccaaaccggggaccgtggacggcgattggcgccttcaggtggatgtggatgttcgcaatctgtttccggcaacggaaaagctggacggctgcacggtttccatggccctgtatgacgctgccggaaaactggtagaacctgtcaagcccaaggatgcgccatatgacggcgtgttggaaaagcccttgcgcattaccggcatgaaggattttaaaacttccctgctgggcatttattccaaacccagactatggtctgcggaggatcccaacctgtacaccctggtactgacgctgaagcgtgacgggaagacggaagaaatggtttcctcccgcgtgggtttccgcaatgtggtgattaaggacagcgtgtttctggtaaatggccagccggtgaaggtaaagggcgtgaaccgccatgaaagccatccggaaacagggcattacgtgactccggagcagatggaggaagaagtgcggatgatgaaacgcgccaatatcaaccacgtgcgctgttcccattatcccgcggatccttatttttattacctctgtgacaagtacggcatttacgtgcaggatgaggccaacatcgagtcccacggctattactatggcaaggagtccctttcccatcccattgagtggatgccggcccatgtggaccgcatcatggcgatggtggagcgcaacaagaaccatccctgcgtgattatgtggtccctggggaatgaagccggccccggccagaatttccgcagtgcggaaaagatggtgaaggccagggatatgtcccgccccacccactacgaacgcaataatgacattgtggacctggggtccaaccagtatccgtccgtggactggacgcgttccatggcgggcaacaaggattttcccaagccctactatatttccgagtatgcacacaacatgatgaacgccatgggcaacctggcggattactgggaggccatcgagtcttccgaccgcattatgggcggcgccatctgggactgggtggaccagggcttgtacaagaccctgccgaatggagaaaagatgctctgctacggcggcgatttcaacgaccatcccaatagcggccagtttgtgttcaacggcaccatcctgtcggatcgtacgccggaaccgggttattttgaagtcaagcacgtctatcagaatatttccacatctttgacggacgacggcaggatttccattttcaacaagaatttctttacggacctttctccatacgacattacctggaccctcacggaaaacggcaatgtagtggctgaaggcaggctggacacgcctccggccggtcccagagaaaagattgtggttcccattccggacattccccagttgaaaaaccggaaaccgggggtggagtatgccttgcgcataagttacaagctgaagaaggacagggggtgggccaagaagggatatgaattggcctttgaccagctccagcttcccgtgcagggagatctgcctgtgttcaaggctcctgcgggcaaagtcagcctcagcacggacaagcataccgtttccggcaaggatttttccgtgcagtttgacgcggccaccggggaactggcccagttcacggtaaacggcaagcctctgtttaaaacgcccatggcggtgaacgccctgcgcgccgcctccagcaatgagccgggcgtcatggccaagagcatggctaacggcctccgtgaactgaagcatgaactgctcagttacgaagccattgataacggcaatagcgtcaccgtcaagcaatccatcaaggtaagcggcaaacaggctgaaaacatcagcggctacggcgataccaagaccaccatcacggccaggaaacaacccctgaacgatacgaacacccatttcatcaataatttggaatggaccatctatgcggatggaactgtcgtctgccagtccgtactgcttccgcgcggcaatcccctggaactgctgcgcctgggatacgaactccagttgccggcgaatatggacaacgtagcctattatggtcgcgggccggaagaaaactatgcggaccgcaagagcggcatgcctctgggcgtgtataaaacgacagcctgggattctttcttcccgtacggcagaccgcaggattgcggcaatcatgaggatacccgctgggtggccgttacggacgacaaggggaacggcctgcttttcggttccgtgggcgcatcgttcgctttctccgcccttccgtataccaccacggatttgatcctggcaaaccaccccgtggaactgccgaagacgacggataagaccgttctggttctctcttccgccacgcgcggcctggggggtgcttcctgcggtcccggccctatgggcagggacatcatcaaggccagcaagccctacccgatgtccttctttatgcggcccattaccgccaagtcctacaagggggaaatccgcgtgcctgcggcccggctggatatgaccatgctgacccgcacggacaagtatacggtcaagagtgtaaccagccaggagcagggcgaagcggacgccgaattcgccattgacggtgatcccggcaccttctggcactctgaatacaataaaaccgtgaccaaacatccgcatgtactggccgtggacctgggtaaggagcgggaattctccggaatcacttatcttccacgtcaggatggcagcagcaatggccgcgtgaaagattattccgtggacgtgagcacggacggagagaaatggcagcctgccgccaagggccccttcccggacagtgctgacctacaggaagtgaaattccaagctcccgtcaaggcgcgttatttccgcttctccgcccttagtgaggcgcaggggcgggattacgccgccgtagcggaactggatatcattcccgttaagaaataactcctgcggtttttaccgtttgaacaggcgccccgccgctctttccgagtgcgcggggcgttttattgccgggctccatgggtttcctggagggaaaatgcagaagaagatggaggatgaacaattggcagaacaaaaaacccctgtacgggaaatacccgtacaggggtttgatgaaaagggaagcttctatttccgtttacggcgtaccatcagggccgtcaaacccagtaagctcatggtggctgtcgcgggttccgggatcaaaagctggatggtattgttttgcagattgatgtttcccaggatgcattcggtgtagtagtcaagctcgtttgttagagcctgctccttggtcgtaagccacagatcgaacgtctcggtgccggatatatctatattatcgtaattaagcagactgtcgctggatacgtctttaaagacaaaaagagctgtttctccatcctgtcccgtcaccattagataaaccggggatgtcagggaagaagagtaatctccggacaagttaaatctgccgtcagcgacgccgccattttgctcttccggtatatttgtcaacgcgctggtgaagttgttctgcatgctcatcagatcactgtatttcagttgatcctgtgcatacgaattgccttggaagttccatcggctggtggtcacatcataactccaagtaccgctgctgaaggtacctaaaatggcattgcctgcatttagcggttctccgagagaattgattagggaatatgcggaggaatcgtcattgctgatattgaaactgtccgctaaggcaatttctccagaaaagagagcgcaggcggtgaaagcattggtgaaaagggagcgatagaacatggctggttatttgttggtttgatgtttgctggacaccgtgatgtaggaaggtgtcttggaagattcgtagtagatggaaaaaactccgctgaaggggatattggaaacgtcctctccattgtcctgacgtttccaggaaccgttgttgttgacgaccttgaccatggcatttttgtcatctgcgggaatgttgatgacggcgtcatcaggcaattgcaaagctatttcagccaaagtctgggaaaggggcaggcgagtgtgaagaagggaattgaatgtgggaacgaccagcttctgattcttcagggatacttccccaatgaccacagctgtaacatcggaaccagctttgcgcgtaatggtcaggggttcatggctgaacaccggcatattgccgatattttccgtagatccccttcttctccattcatttccagaataataagcggcaagcttggtggttgccgaattaaagatattaaccgtgtctgcagacatggcggagccgcttttcaggccaaactggttgtcttctccaagaatatcatccagagtgcgcgccttgcgcaggacatatgaatcggggggagtgcccttgcttaccagatcagaaagaaggcggtcatccactttaatggaatgctccgtccagctggctcccggttttttccaaccatcccggtttaagggaagagctataacttcattgccgaagtgaagaaccagcacataggcggagttttcattcatcaggtcgttgaaattaacgtccgggtccgtgatggtgactttattaccggaaatggtaatgttgccttcttcaagggtgtgctgtaccaaggcttccggatgcacccctaaacccagataacccgttgctttggcgtacagggttgtctggatatagccgcagggcgtactgtaagccgtttccgcatgcagggaggcgattgttgccggaagcaacgcgcatgcgcagagagaggctggcagacaatgtaccggattgataaacattaacccattaagaagaaaggaaatcgtttgtcaattaggaaagggggaaacattcccgtttttcatttgtcagacttttccccggatggaggaagctttcaggtttgtccgggggatggccccgggatttgaagcgcaggaagggctgccgccgcttttttcaatgcctccggaacagtaacttccaatggccggacacaggaaaaacaggacggaggcagggtggtagagatacggtgcggaacctggaaggggaaaatcatgaaaaaaagatttcaggaatgcttggcagaggaaggggtggggagagcctgaaaacaggggagaggatttaataaaattttaatgttttttccgggttgttttatttgcgccctgaacgttcttccattaggttgattccaacattcaagccggatatcattccgattcctcttttcatgttttcagaaacgcattcggacagccagcgggcggacaggattctggcctccatccggagggaggaagcccgtcccggccgcggcttgctgaaaatcttctttggcatggcgccgggagtaggcaaaacatgcgccatgctggaggcggccattcaggcggcggacaagggcgtgcaagtcattatcggcgtggcggaatcccatgggagggaagatacgatgcggctcattggcaggctgccgcgccttcccatgaaaaagatggtttaccggggagtggaaatggaggaatttgatttggaggaggcattgcgcgtgaagccccagcttattctggtggatgaactggcgcataccaacgtcccgggaatgcgccacaggaaacgctatcaggacgtggaggatttgctggccgcgggaatagacgtttacaccacgctgaacgtgcagcatctggaaagccgttccgataccgttcacgacattacagccgcccccgtgcaggaaaccgtgccggattccgtattggcggaggcggattgcatccagctggtggacattactccggatcagctgcggacgcgccttcgggaggggaaagtgtacagcgctccccaggcttccgccgctctggatcattttttcaaggagtccaatttgacggccctccgggaactggccctgcgcatcgtagcggagaaggtggaccatgaactgacggaggtgcgtaccatttccggggaccgctctatctggcgcagcggggaacgtctgatggtggcggtaggccccagcccgttttccgcccggctggtacgctggacgcgccgcatggcttatgccctgaacgctccgtggatagccctttccgtagatacgggcgtgcccttgcctcctgaacagcagcagcggctggacgccaatctggaattggcgcggcggctgggcgcggaagtgatcgtgatgcccggttccgatttggcggaaacgctgctccgcatggcttttttaagaaatgtcagccaaattgtggtgggcaaaccgcaggaaagctacctgtggggcctggtgcggcccatatccctggtggataagctggtgaagggaagcgaccagattgatatttacgtggttcccgccgcttcgggaccgggccgtaaccgttggaagagctggcaccggaaaacggagaaagatggccgggattactggctggccgcaggcgtgacagcggccgtcacgggtgccggcctgctggtttccgcatttaccggttattttgctcccggtttcctgtatttggccggagtagtggggctgggctttttcatccgttcccgctgggccatgcttctggccgcggcgctgagcgtcctgttatggaacctgttgtttattcccccggtgatgacgttcaagatagagcggctggaggacgccttgatgtgcttctttttctttttggtggccctttctacgggacggctcacttcccgcctgaggatccgcgagcgggaagaacgggaacgggaaaaaaagaccaatgccctgttcctgtattcccgggccattggatccgcttcggacgtgccttccctcatttccgtcgcggcgggacagatcagccagattatgggggtgcgcctggctgtcatgacgccggaaggaggcggcggtaagctgaggctttgggagaccggcggagagtacgccatggatgagaaggaatggagcgtggcagtctggtgtatggaacaccgccgccccgcaggaaggtttacggatacgatcccggtagcggaagggttttaccttcccatgatgtccggggagcgttgcatgggcgtactgggcgtaaggccagaggaaggggagtgcctgacggccgggcagaaggatttgctggaaagcatgggagcgcagctggccatggcgctggagcgtgaagaattgagggcggaacgggcgcgtacgcggctcatggaagaatcggaaaaactgcaccgatccctgttggacagtgtttcccatgagttcaaaacgcctttggccgtgattgagggcggctgtgaaaaattggccggacgtgccgcgtccgcaccggaggagcgggaagaatacggggaaattttactggccgcgcgccgtctgcgccgcctggtgaagaatttgctggatgtgagccgcctggaatccggcgctttgaaacccaaactggactggtgcgatctgggggatgttattgaaggggctctggctgctaccagggaagcacgccggaatcatcccgtgtctgtttccctgccgccggactatccgctggtgaaggcggatttttccctgatggaacaggtactggtcaatctgctgttgaatgcctgcgtacatactcctgagggaacctctgttacgttgcaaggtggtaccgactccgcgcgcggccaggtttggctggatattcatgacatggggccgggcattcctcccgaacgggcggaaaccatttttgagcgcttccggacgacgcggcccggtggtttgggcctggggctccccattgtgcgcgggtttatggaagctcagcgcggtgccgtctccctggttcccgtttccgccggaacatgtttccggcttgtccttcccctggtggagcacgatagtgttcctgaagagtaattcctcctgcctcatgagcaactttcctgcagatatcctgataattgacgatgaacggcagatacgccgtcttctgaacctgacgctgaccggcgcaggctaccatgtccgcgagtgtgaaaacgggcagcttggcttgagtgagaccgcgctgaagcggccggatgccattattctggatctggggcttccggacattaacggcctggaagtgctgaaacagcttcgggagtggactcaggttcctatcctgattctaacggcttgggacagggaggatgaaaaggtggatgccttggatgccggggcggatgattacctgaccaagccgttcagcggccgtgaattgctggcgcgcctgcgcgtgatgcttcggcgcaatcgtccggaccgcgagccgtccgtattccggctgggtcccattgtcgtggatctgagttcccggcgcgtggagaaggggaaagaggaaattcatttaacctccaaagagtacggaattctgcgcctgcttctgctccatcagggcaaggtgatgacccatcgccagctgctccgtgaaatttggggcccccagcatgaggaggacacacactatctgcgggtgcacattgcccacctgcgccagaagctgggggattccgatccggaaaaccgcattatccgcgcggaatccggcctgggttacagaattgtggcggatggagccgagtagcccttgtcccgttttactgggctggaaaaaatagcggcgcattatctgcggcagccggaaaatatattttttcataacggttggagaatgtggcttaacttcacgcagttcaacatgctgtgtaggctccaagacgtattcaatacgtctttatgaagattaagtacaacgcaagaaacgtaggagccgcagccctgggctgcgccatgatagcaggaaccgtctgcgcaggagaggaaacggtttctccgtcgatagcctccctgacaaacatgcaggaggccgccataccttccacagacgcggactgggccttttccttctcggcggggtggtccagcaagtacgtaacggaaggtctggactgcctgccgggcagcggcatctgggaagtggctccgagcatttcttggaagaatcttacgttcagcgcctggtatgccggaggagattccgccaattacgatgaactggacctggttctgggttacgcctggaatctggggaagtggactgtcaatccctggtatgagcaccaattctattttacgcaggattataatgtggccaatccggcgctgacggtctcctatgccgtaacggattggctggctgtaggagcggaaacccaggtgaaagtggaacaccaggattttgaagcctattacagcgcctttgtgcggttggagtggtcccccctggaaaatgtgaccgtggttcccatggtcaggtacgggtacaacggcggttataacgtggactatgatgacggctccaactgcattgactggagcctgggtgtgacgtggaggtttgcagaacattatacgctttccggctccgtcaattattcccaggcggctacggtgctgcgtcacagggatgccggagacgaattctgggtgggattccgcctgggcgtggagttttaacggcgcatcggcgttaaaaaacgggcttccggagaggaattaataatttcttaatgtccggaggtcctttgttaactacccggaatttccagaatacgcgtagagttgcgttgtgtcctcacacgacttgttaatcattgtcctgttcataggcatactggtctctttcaccccgtttctcggaaaatggctggcaagtgttttgatgggaaggcagacatggctttccccggttctgggtcccgtggagcgctgcgtctaccgtatggccggagtggaccccacccgcgaaatggactggaaaaagtatctgacggccgttcttttgtttaacgccgctggattcctcgtcctttttctttccctgctgtgccagaaatggctgcctctgaatcccgccggaacggaaaatatgcggtgggatatagccttgaatacggccatcagcttcgtgaccaacaccaactggcagttctattcaggggaagggccggaaggcgtcagttattttgttcaaatgaccgggctgggcgtgcaaaatttcgtcagcgccggcacgggaattgccgtcatgtccgccctgatccgcgggctggaaaggagatgcgcttctactctggggaacttctggacggatctgacgcgcagcacgttgtattttttggttcctgtttccacggtcattgctcttctgctggtctcccagggtgtggtgcagtcctttgacggacccattgccgtgccgggcatggatggcgtggaacagatgatacccagtggcccggcggcatcccagatagccatcaaacagctcggaacaaacggcggcggctttttcgggaacaacagcacacatccttttgaaaaccccacgcccttcagcaacatggttgaaatgatttccctgcttctggccggctgcgcctgcccatacgcctacggcgtcatgattggaaaaaagaggcaggggtggattatcttcggagccatgatgattctgcttgtggcggccattgtcttgtcccagtgggcggaacatgcgggaaacccgcttttcccgggcatgaaaatgctggaaggcaaggaagtgcgcctgggcgttacgaacagttccctctggtccgtcgctacgacggcatcttccaacgggtccgtgaactgcatgcattccagcatgtccccgctgggcggcggcattgccctgttcaatatgttgctgggtgaggtaattttcggaggtctgggctgcggcttgtacggcatgctgatgtttgccatgattaccgtgttcctgtgcggtttaatggtggggcgaaccccggaattcctgggcaaaaaaatgggagcccgggaagtgtgctgctccatggtgggtgtcctgctccccggcatggccgtcctggtcatgagcgggctggccgccgctacggaagccgggcgggcgtccatctgcaatgccggcccccacgggctgacggaaatcctgtactgcttcggttcccaggccgggaataatggaagcgcctttgctggtctggctgtaggggatacgcctttttattccctgctgggcggtttggcgatgctgctggcccgtttcggaaccattatttcggtgatgatgattgctggcagcatggcatccaggaaaatttctccgccggcccagggtaccatggggacggataacctgatgttcatggttctgctggtagccgtcgtgctggttgtaggagccctcaccttcttcccggccttggctctgggacctattctggagcatttgctcttgtattcgggaaccatgctttaaggcgtattcgccgataatccggatgtttatgatcatgaaggagaaaaagagtcaatcctggtatgacggagccgtgttgaaaacagctttccggaatgcgttgcgcaaatttgacccgcgcgtcctgtctaaaaacttcgtgatgtttatcacggctgccggcgctctgatggcaacgattgcccttatcagggatttggctgccgggcaacccttcggctttactttgcaaatcgcgctctggctctggttcaccgtgtttttcgccaactttgcggaagcgctggcggagggccggggaaaggcgtatgcggacgctctgaaagaaatgcgcgtttatgtgaacgcccgtttgctgacggacaagggaacggaggaaatcgtctccgtttccgaattgcgcaaaggggacaaagtgttgtgcgaggccggggatatcatccccctggatggagaggtgatagaaggcatcgctagcgtggatgaatccgccattaccggggaatccgctccggtcatccgtgagagcgggagggaccgcagcgctgtaacgggaggaacccgtgtaatcagtgacggcattgttatccgtattaccgtggaaccgggccatacgttcctggcccgcatgatttccatggtggagggggccagccggcagaaaacgcccaatgaaaccgctctgggcatcctgctggtggcgctgaccattgtttttcttgccgtggttttttcccttcccgccatggccggatacattgaggattctgcccggacgctaggcttcagggcggagggccgtatttccctgcccatcctggtctctcttctggtatgcctgattccgacgacgatcggcggattgttaagtgctgttggtatcagcggcattgaccggcttgtgcgccggaatgtgctggctgtgtccgggcgcgccgtggaagtagccggggacattgatgtgctgatgctggataaaaccggaaccatcaccttcggcaatcgaatggcgaacgaattcctgcctgcacccggtgtggatgacctgcagctggcggaagctgcccagcttgcttccctgtccgatgaaacgccggaaggccgcagcatcgtagtgctggctaaaaaacagtttggaatccggggccgccatatggacgcggaccatattgcttttatcccgttttccgcttccacccgcatgagtggcgtggatattgcggagcacgacggccgtccggccgtttccatccggaaaggagcggcggaaagcgtggcgcagtgggtgaaaatccggggcggaactttcccgcaagaggtggaaatgatggtgcagaatgtcgcgcgtgtcggcggtacgccgctggtagtggcccggggaaaagacgtgctgggagtcatttatctgaaagacatcgtcaagggcggcatcagggaacgctttgcccggctccgggccatgggcatccggactgtcatggtgacaggggacaatgccctgactgccgcatccattgcggcggaagccggcgtggatgacttcatggcggaagctacgcctgagatgaagctggcgcgcattcgtgaggaacaggctgccggccgcctggtggccatgaccggggatggaactaatgacgctcccgccctggcccaggccgatgtgggtgtggcgatgaacactggaacgcaggccgcccgggaggcgggcaacatggtggacctggacagcaatccgaccaagctgattgaaatcgtagaaatcggcaagcaaatgctgattacccgcggcgcgctgaccaccttttccttcgccaatgacgtagccaaatactttgccatcattcccgccatgtttgccggcctctttgtggctgacggcatggccagtggacctctttccgccctgaacataatgggcctgaattccccgcaaagcgccattctcagcactgtgatttttaatgccctggtcatcgtagcgctgattcctctggccttgaaaggggtttcctaccgtccggcgggagcggcctccctgctgaagcgcaatatcctcatttacggggtgggcggcctgattgctcctttcatgggcatcaagcttattgatatggtcatcaatgcatggcgccttgtttgaaaatccaatcctaacctgctgaattatcatgaagtggacatttcccaatctgcgcctgtttctgtctctggccgtcattaccggaggcatttaccctttggtcgttacgctggtcagcctgatttttttccctcatcaggctcatggttccctaatccggaatgaacggggggaaattatcgcttcggagcttgtcgcacagccttttatctccgccaaatatttctggccccggccctctgccggagaatacgctaccatgccttccggagccagcaacctctcctggacttccgggaagctggtcaggacggtggcggagcgcagggcggctctgctgaaagcccacagtctgccggagaaaacgcctgtccctgcggacatgctttttgcttccggcagcggtttggagccttttatctctccggaagcggcggaatttcaattgaaccgtgttgcctccacgcgcggagtgcctccggaaaaaatccggaaactggtgtctgaacacttcgtccggggcggaattttgggggaaaacgtagtcaacgtgatgaccctgaacgctgcgctggatacattgttcccgatgagcgggatgtaattgaccgccccggttcggaaaatatcctggcggaaaaatcgtccggcatcagccggtgccttggttccgcgtctttctccggttaccggggcggttttcttattggatttttgtcagtttggcctaatttgttgaaaaacagagacaataaattggccggcgtgcggtatgctgccggataatcctttcagaatgcagcaatagggggggcgacatcctctcgttagttttattaggctgatatgaagtttcttcagccccaaatgcggctgtttacaaatagtcctcccttggcggtgtgaacacatcgacaacctctccgcttcccatcacctcaaaggaacgaggcgtattgtccggtatggcgtagctgtcccctgcatgaagcaacacttcaatattcttctccggcatttccatgttcaggcggtatttgcctgaaatgacgtacccgcattgttcatgcggatgttggtgggtagaggcgaagttgcctttcacatagtacatctttgctgccattgatttctctccgacagcgagcgaatccagtgaaacgcccttgaacactttcttcgatgcgtcttccttgcgaacgatgactttattattttttatgatttccatatcaatacgttatcttcagttccatctggatgtttccgcgttcgtatgccgggtgattttccgcaagttccttgaatcccagctttttatatgtgtgtatggcgggtttgagcagggtgttgctttcaagaaaaagaattttcgccttcatgtcctttgctttgtctatagctgcatggcaaagtatttccccgatgcctttgccctgcgcatgagggtgaacggcaagtttcgccagttcataatcatataccgggtcatccattttgcagagggcacaaactccgacgggctttcccctgtaaagggctacaaagataaagcctcctttgttgataatatattcctgcggatgatcaagatagtccagatcgtgcggttctatcttccaatgttgcgtaatccactgtacgttaagtgatttaaacgtattcttgtaacacggttcgtaaggaattaccctgatatgctccctttccctcattttccgggcttctttgacccgttgcagcaggctcttctcagcgagccggtcttcccattcgccgatagctctccacaaatcatggcgcgtttccttggaaatatcctctacggcgacctccacgtctttgcagagctctgtcagcatggcggcaacccttttcccatgtggagacagggcgatgacggtgcgtctcttgtccttctggtcttcaaggcctttcaccaatcctcttgccgtcatttctccaacgatattgctcacggatggatgactgtgccctatttccttagctatgcccgttattgttttctctttcccgccggctaaaacgaaaagcaggggaaaccactttggctttatgtcaatgccgtataattcataaatttgacttgcatcagacgtcacagcatccgtcagcatgcgcagcctgcttccaatggctattttacctgtcctattgaaaaaatccatatctttccgttattaaatacgtaactgattacgtaactaatatgccattatcatgcgagcaagcattttttcacattttagtcttcttgcaggtggggaatatcgctgtatccatcaatggaatggaaaaatccgtctcctgtcagtcgggtaggctgcgaacgtggtatttggcattgccgcccttgcccacgcgattattttggagcatgggcaagggctgttcctgcgtttctatccggtacggggctgccgttctttccggaaatattttccttggcgttcaggatttacactattgccgggataccggatgcgccagctccatgagaaagcgggacaggatttccttgtcagggcggactctccaataatccgttgagcgtgcaagtgatattgcggggaatccggaggggcaaaaaatttttagataacaggaaaaatcctgtttttccattcaacggttggagttattcttatgtctaaaataccaacataccatgcttaacaatctaacaacaaaatttcaggaagcgctgatgcaggcgcagcaaactgcaggccggcttggaaaaccggaaatttcttctctggacgttctggtggcgttactggagcaggaaggcggaattctttcccctattctccgcaaagcctcttgcgatccggggctgcttctccaggcagcccaaagggaggtttcccacgaacctactcaaagcggcgccaccacccagccgcagatggggcgtgacctggctaccgtcatgcaggctgcggaagaggaacgcaaaaagctcaaagacgactacctcagcgtggaacacttcatgcttggggcgttggacacgcaaaacaaagtgcaccagttgacggacacctttgggctgaccaaggataactatctggccgccatgaaggaagtgcgcggcaaccagcgcgtgacggacgacaacccggaaggcaaataccagacgctggaaaaatatgggacggacctgacggcccgcgcccgcgccggtaaaattgaccccgtcatcggccgtgatacggaaatccgccgcgttttgcagattctttcccgcaggacgaaaaacaatcccgtcctgatcggggagcccggcgttggcaaaaccgccattgcggaaggtctggcgcggcgcattgtcaacggcgacgtgccggaaagcatgcgcaacaagcgcattgtatccctcaacatcggctccatgcttgccggagccaaatatcgcggtgaatttgaagaacgcttgaaatccttccttaaggaagtaacggattccaacggtgaaatcattctgtttatcgatgaactgcacaccatcgtaggcgcgggcgccagtgaaggggcggtggatgcctccaacctgctcaagcccgccctggcccgcggggaactgcggaccatcggcgcgacgacactggacgaataccgcaaatacattgaaaaagatgcggctctggaacgtcggtttcagcccgtcatggtctccgaacccagcgtggaagataccatcgccatcctgcgcggcttgaaagaacgctatgaagtccaccatggagtgcgtattacggacgctgccatcgtagcggcggccaccctttccgaccgttatatttccgaccgttttctgcctgacaaggcagtagacctggtggatgaagcggcagcccgcctcaaaattgagctggactccatgcccacggaaattgaccagattgaacgtgaggccatgcagcttgaaatggaacggcaggcgctggcgaaggaagaagacgccgacagcaaggcccgtttggaaaaaatcaccaaggacctggccgacctgaaggaaaaatccggttccatgattgccaaatggaaaagcgaaaaggaagtgctggacgccgtccgcagggaacaggaaaaaatagaagccctcaagctggaaagcgaaagggccaaacgtatgggtgacctgacccgcgcgtcggaaatcacctatggcgaacttccggaagcccagcgcgccctgacggaaggcaaggaaaagctcagtaaaatgcagaaagaagatggagggctgctgaaggaggaagtcacggaaggagacattgccaaagtggttgccacctggaccggcattcccgccgcccgtctgcaggaaggggagcgtgccaagctggtgcacatggaagagcgtctgggcgcccgcgtaatcgggcagaaacaggccgttaaggccgtatccgacgccgtgagacgcgcccgcgccgggctgcaggatgaaaacaggcccatcggctctttcctgttcctgggacccaccggcgtgggcaagacggaactcagcaaggcgctggcggaattcctctttgacagtgagaacgccatcgttcgcattgacatgtccgaatacatggaaaaacattccgtcgcgcgcctcatcggggcgcctcccggatacgtggggtatgaagaaggcggtcagctctctgaagccgtgcgccgtcgtccgtactgcgtggttctcttcgatgaaattgaaaaggcccacccggacgtcttcaacgtattgctccaggtgctggacgacggccgcattacggacggccagggtcgtacggttgacttccgcaacacggtcatcatcatgacctccaacatcggcagccagtacatcctcaatgaagccaatgcggaacagagggaagccaaggccctggaagcgttgcgcggtcacttccgtccggaattcctgaaccgcattgatgaaatcatcatctttgaccggctcacggcgcaggaactcaagggcattgtggacattcagcttcagcgtgtccgcaggcgcctggaagccaagggcctgtttttgcgcatgactccggaagctacggctctggtggcggatcatggttttgatcctgtgtatggagcccgtcctctcaaacgggccattcagcatgatcttctggacccgctcagcctcaagcttctggaaggagacttcccggaaggaacggaaatcgtggtacgggaaaaagacggcaaactggacttcaccaaggagaaaagataattgcatttctcggcatgttgccggaaaaacaatgaagggcgtcccctgagagggccgcccttctgatataaagattcccgcttccgggagctgaagaaaatctgctgcgcggttaaatctgggacagagcgtcgtcagcaacggcggcggcgcaaagcgagtgcggccagccctaggagggaaagcgtagcggtagcgggttccggaaccatgttccagcccatggaacgcattaatcccacttctccatccgtcagggtgcgatgataggtatccggtgagatggaatactgcataagggcgtctggatcgctcgtgctgtcaatgtgggccatgctggacccttccgaccatgtggtggggttatagacagtaagccccgtatcgcccagagacaaagtttcccctagggtaaatgccgtattcccatttccggctttttctacgatggactggccttcttggttggttaacagggaatcatacttggtgtacagcatggtgctgtaggttgtggaagcgcttccggattggacttggaaagtgcctgtctgcgtcgccagggaaagaaaaccaacggcatgccccacttcatgggtcaggatgctttgaaaatcatattttcccgtatgctccgccaataaggcggccccataataaagggaagccaaatgagaggtattgcactggatgtaaatatcatagcctgaggtagtccttgtgcttccatcgcgccatacggcctcggccatggtggaaacctgttgtggcttgtttgacaggtagtagtaataaggggaataagcggaggctagggtggaggaatcggctccgtcgtaccaggtgaggcctacgttaagcgttcttcccggggtggaattaatcagggtattccatgtgttcaacgcccgtatggcggaatctatctgatcactggtccaggtatgagtacttgaagaatcaaaaaatcccttctccccggaatctaggaaggtgcatgaaaaagtggagcctatattaactgtctgtacagcagatgagaaaaaagtgcttcccaagcagaaaacagtgcagagaatgccaatttggaatgaacttttcatagataaaaaataataaacccttgaatagcaaaaaaatcctttctgttcaagtgaaaataaatcaagtctgcttctttttcagggaagacgggtcagacaccccttctttttttctggctcttgttgcataacaacaaaaaatgctgaaaataccggcaggggccctcctggtaaggacagtttccttgtaaaaaatgtaacggcgcaagatagttgcgatatgcgggacaggttgttgcgatatttcgccacttgctgccaggaaaagcccctttccggaagcctgacgcctgaaaacgggtgaattcgcgtgacttttacccccgaatttgctataaaaaactcaccggaaggaaggttgatccgtaccttgaaccggggctattgccgccgctgccatcagctttattttggcgttgcaaagggagtgcataatttccgccctgcgctcgcgcggcactccataaggccggggattgcctgtcgtcaccatccggaatatccgggcgtataaatcagggggagcctcggcgctgtgccagcaccggcaggaccagcgggaattctccgaaataccgatcgttccggaatctttttgtttaccattcccgggtgtcctccggttcggtcggcatctttccctcaaaaccattattttcggcttggctttggcctcgtaatattgacagcccctccgaagaggggcgatttcatatcgcaacaacctgtcccgtttcaggcagtttcatgttccttcatcacaattacccgtctcttctttccatcgctgtaatttcccgccattgctagctttcaccctatttcaactatactgtcccttttcaaaaaggggaagagcgaggggaaaaagggaagcgttcaaaaaaagacgcgccaggatgggggattatgacaaaagagcatctcattgattaggtgtgtattaagggtggttgcagtgggtatggcctgaataaggatcgggaaaaaatgaaaaaacatctcgaaaaaaattgacaaaaaggtgtggtatggtagatttctcggcacgccaacacggcgacgggatgaaaagcccggcggcggacggactcggaagagtaacggaagcggctggggccggccacccggagagttccctggaagcaggggcgataagaagatttgaagggaatgactaccgaaaaccgccgagggttttccgagggcgtcgagaggcgccggaggagcaaaaagcccgaaggagcgacctagctctgagaggggtggtttggtagaagcaaggggaaagaaaaaaggtcgtgacgcgcgccgtgcgaggcagagcgaagaggtcttcaagagacacaacttgaaggaagagctggctgaagcatggcgcaaatgaaatcgcaagattccatttggtccagcaatttcaaaaattaatttgatggagagtttgattctggctcagaacgaacgctggcggcgtggataagacatgcaagtcgaacgagagaattgctagcttgctaataattctctagtggcgcacgggtgagtaacacgtgagtaacctgcccccgagagcgggatagccctgggaaactgggattaataccgcatagtatcgaaagattaaagcagcaatgcgcttggggatgggctcgcggcctattagttagttggtgaggtaacggctcaccaaggcgatgacgggtagccggtctgagaggatgtccggccacactggaactgagacacggtccagacacctacgggtggcagcagtcgagaatcattcacaatgggggaaaccctgatggtgcgacgccgcgtgggggaatgaaggtcttcggattgtaaacccctgtcatgtgggagcaaattaaaaagatagtaccacaagaggaagagacggctaactctgtgccagcagccgcggtaatacagaggtctcaagcgttgttcggaatcactgggcgtaaagcgtgcgtaggctgtttcgtaagtcgtgtgtgaaaggcgcgggctcaacccgcggacggcacatgatactgcgagactagagtaatggagggggaaccggaattctcggtgtagcagtgaaatgcgtagatatcgagaggaacactcgtggcgaaggcgggttcctggacattaactgacgctgaggcacgaaggccaggggagcgaaagggattagatacccctgtagtcctggcagtaaacggtgcacgcttggtgtgcggggaatcgaccccctgcgtgccggagctaacgcgttaagcgtgccgcctggggagtacggtcgcaagattaaaactcaaagaaattgacggggacccgcacaagcggtggagtatgtggcttaattcgatgcaacgcgaagaaccttacctgggcttgacatgtaatgaacaacatgtgaaagcatgcgactcttcggaggcgttacacaggtgctgcatggccgtcgtcagctcgtgtcgtgagatgtttggttaagtccagcaacgagcgcaacccctgttgccagttaccagcacgtgaaggtggggactctggcgagactgcccagatcaactgggaggaaggtggggacgacgtcaggtcagtatggcccttatgcccagggctgcacacgtactacaatgcccagtacagagggggccgaagccgcgaggcggaggaaatcctgaaaactgggcccagttcggactgtaggctgcaacccgcctacacgaagccggaatcgctagtaatggcgcatcagctacggcgccgtgaatacgttcccgggtcttgtacacaccgcccgtcacatcatggaagccggtcgcacccgaagtatctgaagccaaccgcaaggaggcagggtcctaaggtgagactggtaactgggatgaagtcgtaacaaggtagccgtaggggaacctgcggctggatcacctcctttctatggagcaagtgcacggaagtgcacaggtcggatctcttcccgaggggagagaaagcggaacccgcgagggcccgcaacgaaccaaagatgtgtaaacagccagacgcctggagcgcaacctggcacgacgtgcgtgacgaccttttttcaccgagaaccgcaactgggggtatagctcagttggtagagcgccagctttgcaagctggatgtccggggttcgagtccccgtgcctccaccagtttcgggaaagagacccaaagccgggcctgtagctcagttggttagagcacgcgcttgataagcgcggggtcacaggttcaagtcctgtcaggcccaccagcaaaatcgattattgagggaaagcgaaaattgacatctgcgtggcaaagaaaacgattgctgagaagcaatcgctttccaacaaagtgggtagttgaacaacaactacaaaacacaagataaacatgcataccaagcaatgagacaatacagtaagtcacgaaagggctttgtggtattgtggaagtggtaacagcttttgcaatatgatgaagtaagtaagggcgtacggtgaatgccttggtgccaacaggcgaagaaggacgcggcaagctgcgaaaagcctcgggaagctgcaagcaagcgatgatccggggatatccgaatggggtaacctgatcgaggcaatactcgatcgttcatacctgaatacatagggtatgaaacgcgaaacccgctgaagtgaaacatctcagtaagcggaggaaaagaaagagaaatcgattccgtaagtagtggcgagcgaaagcggatggagcccaaaccgaaggtattccttcggggttgtaggaccacgtcatattcgaccatactggatagtagaacagcctggaaaggctggccggagaaggtgaaagccctgtagacgaaatccagagtgggaattagtggtatcctgagtaatacatcacacgtggaacgatgtatgaacccgcgcggaccaccgcgcaaggctaaatactagttggcgaccgatagtgaacaagtaccgcgagggaaaggtgaaaagaaccgctgtgagcggagtgaaatagaacctgaaaccgtatgtctacaaagtgtcagagcagagcaatctgcgatggcgtgccttttgtttaatgagtctgcgagtcagtgtttgtggcaagactaagggcttccggcccggagtcgcagcgaaagcaagtccgaacagggcgcaataagtcgcaggtactggacccgaagcggaggtgacctacccttggccaggttgaagcatgggtaaaaccatgtggaggaccgaacaggtgaacgttgaaaagttctctgatgagctgagggtaggagtgaaaggctaatcaaaccccgtgatagctggttctcttcgaaatgcatttaggtgcagcgtcacgtgctgatgcgcgggggtagagcactgacaaggctagggggcacacccgcttaccaaaccttatcaaactccgaataccgtgcaatggaacgtggcagtgagacagtgggggataagcttcattgtcgagagggaaacaacccagaccagcagctaaggtgcctaaataacgctcagtggaaaggatgtgggattacacagacagtgaggatgttggcttagaagcagccaccatttaaaaaatgcgtaatagcttactcatcgagtgatcctgcgccgaaaatgattggcgatcaagcgttataccgaagctctggactttgccgcaaggcagagtggtagaagagcgttgcatgcgcgtcgaagggcgatggcgactgaccctggagcacatgcaagtgagtatgcagacatgagtaacgttaagccgggtgaaatccccggccgccgtaaacccgaggtttccagggcaacgtgtttcgtccctgggttagccgggacctaagccgaggccgagaggcgtaggcgatggacatcaggttaataatcctgagctcgcaacccttaaactggggggacgcatgagaaaagatgactaggttattgaattccgagttgagtccacggactcagcgcatcattggatcgagtgccaagaaaagccccagcgtatgctaagcgacccgtaccgcaaaccgacacaggtgggtgggtagaatataccaaggcgtaagagtgaaacctggttaaggaactcggcaaattagccccgtaacttcggaagaaggggtgcctgcagcgatgcaggccgcagagaaatggcccaaccgactgtttatcaaaaacacagcactctgcaaagacgcaagtcgaagtatagggtgtgacacgtgaccaatgccgaaagattaaggcaaggggttagccgcaaggcgaagctctaaacccaagtcccggtgaatgtcggccgtaactataacggtcctaaggtagcgaaattccttgtcgggtaagttccgacctgcacgaatcgtgaaacgagttgggcactgtctcaaccaggcgctcagtgaaattgtagtggcggtgaagatgccgcctacccgcagaaggacggaaagaccctatagaccttaactgtaagctgtcattgtttcttcggttttaatgctcagagtaagtgggagacgctgaagacgccctttagggggcgtccgagtcatcaatgagacaccaccctttgaaactggaggatctaaccctgagccgtgaatccggccagaggaccgtgtcagccggtcagttttactggggcggtatcctcccaaagagtaacggaggagcgcgaaggtgggctcagcccggttggcaaccgggtgtcgagtgcatgggcataagcccgcctaactgtgagaccaacaagtcgagcagatgcgaaagcaggcccaagtgatccggcggtagaaagtggaattgccgtcgctcaacggataaaaggtaccttagggataacaggctgatcacgcccaagagttcatatcgacggcgtggtttggcacctcgatgtcggctcgtcgcatcctggggctggagaaggtcccaagggtccggctgttcgccggttaaagcggcacgcgagctgggttcagaacgtcgcgagacagttcggtcctctatcctctgtgggcgttggaaaattgaggggttcagaccttagtacgagaggaccgggtctgacgcaccactggtgcatcggttgtactgtcaagtgcatggccgagtagctaagtgcggacgggataagcgctgaaagcatctaagcgccaagcccttcccaagatgagttttccctacaggttcgtggaagaccaccacgttgataggtcgcaggtgtaagtgcagcaatgtattgagccgagcgatactaattaccaattgacttcatcatattacatcactccccgtcgtgaatgacaacttgctcttgtctcgttcacctgtgcatgttcatcaaccaccagccacgcagatgtcagtttacgctgaatccctccccacacaaaggacggaaatcttcttagccgccacacacataccctgaaaaaaatccctcactcagaagcccccaaaaaagcagggctcccgggcaggcaggatgaagaaaaaatcacctcttccccctgaagcccggtggccagagcgcagtggtcccacccggtcccgttccgaacccggaagtgaaacgctgccgcgccaatggtagtcggacgacaggtcccgcaagagtaggtcgccgccgggatttttttccatcaggccccgccagtcacttgactcgcggggcctgttcttttcttgctcggtcccgttcttctccccctacattcttttagttaaggagttgtccgtagggaaaaaatggttgctatacttcatgaggctgccatgtctgcgtatttggttccggaaccggcgacggcttcccggagcctgctgggtttggcggggctggtcatgcggaggcgcagaaggcaggaagcctgatagaggcgggaaagggaagcaaagaaactgcccatgcgcctctgcgtcattattattcagaaaattgtttgaagaaatccgggagaaaataattcttccggtttttatttttcctgattatttctcggaaaattttgaatggggttttaagactgctggtcttttcctacatctccctgttcatgttcctatgggtaatagttgacggttgaaaaagaaaattccggcagctatagtcgtccctaggcaaatgcaattcaaatgattcgttttctatcctttttatttttcctgtgctttttttccgtgtgttctgcaaaagaattgaagatttttttgctgacgggccaatccaattctctgggggcggtgaagggcagccctgcttctccggagctgttaaaaaagtatgaaccgaaggagactctgtactggcatgaaaattttgggcaaagggaaggcgtgtttcccggcgcttccacatcctgggagcaggtaaggcctgctatgccgcgttataacggcaatttatgcatggggccggaatacgggtttgcctttactctggagaagaatggatggttcaaggatgcggacgttgcggtcgtgaaagcttcccgggacggcggcgacaattcccattggcggaaaaacggccaggcttacaggacgctggtgcaggccgtcaagaatgcctgtgcgggtgtggacaggtccaagtattccaaagtggagtttgccgggcttttgtatttgcagggggaaagcaatgccggaacttccgttccggagagcgcttcccgctttctggaacttctgggcaatctggcggcagatctgaaaccgtacggggatacgtccgcactggctgcgcagaaagccgtccttggagaaaatgccaattgggccggaaagaatgaatctgatccggaaacgggtaaccttaccggcggcctggaaggacgcgatacggaagttcagggaaagacaacccgccaggtgatgaaggatctggcggaatcccgtccatccctgggctatgcccctacccgagatcttcccaaactgaccgcaggagatcaaatgggagtgcattacagcggccagtctcagatcagcataggagcccgttttgcttatgaagccgcccggctggccgggaaggataccggctccgtgcgaagcggtcgttacgatcttcccctgggttctccggacgcgtggatgaaccggaaaatgccggggaagaacgtatgcgtgtggaatgtagcttcttccgtaaaacccagcctggtgtcagggggggtgaagttgtttggtatccgtgtggaggatccggtcgtcaagactgttatcgtccggagcaagggaagttccggagaccgtttggtaatcgggccgggaggtattcgcctggcggaggggaaaaatttgcagttgaggacgaatgtacagctggcgggccggcagtcctggaatattccgggtggttctgccgtggagattaagccctcgccggttcaggaaaaagccatgcctgtccgtttgtccggccaggcggaggtgcatgtaacccaagcggaaggcggcggagaaacggcggaagcagcccgcgtcgtattggaacaggtgctgccctctgccctgaaatgttcctggacgttgtccggaaaggtggagatgactttgaagggtatggaggggaaggccgtgaatttgggcaaagtcttcgtcaagcagggcgctgtgctgaatctgaatggctccagacctgttgcgggcagtgtcgttaatcaaggcggcatggtgaatccgtaatcaatagacctggtacggtccggaatgcttgccgtattttttagtggagggaggaggttaaaaaaatacgttttttcctcccggaagggccatgggcttttttcttattcacaggagcggagcggtctggaaaccgaacaggggcatgacctgcggcattttcaccccggtttattcacaggaagttctgcttgggaagcattgatcatcaagtctactgtactatatttggcgtactttttactttatggatgcgttatgtagtagtatggtcgcgccatgagatgcgttcagtgcggtcatttggaagataaggtcatcgactcccgtatgtccaaagacgggacgaccattcgccgccgccgcgtgtgtttgaggtgcgattaccgttatacgacctatgagcagattgaacgcacggagttgcgcgtagtcaaaagggataatctgagagaagccctgaatcgtgaaaagattttacgcggcctggtaaaggcgtgtgaaaaaaggcccgtcagcatggatcgcctggaccgcgccgtggaagagatcatttccgaattgcaccgcgaccatttgcgcgaagtcccttccagcgagattggcaagaaggtgattgaaaaattgtatgccatagatcccgtggcttatatccgctatgtgtccgtgtaccgccagttttccaatgtggaggagtttatccaggagattacgcagatgcgccaccagacgcttattgatcccctgcagcgcaagcttcccattctttaaatttcctgttccatgatcggcttccgaaacaacagaccgttgctcaagcttggtgattgcctgattaccgagtacggggaacaatggctggcggatgctttggagcacgctgcccggcgtgccggaacaacccttccgttcaaggaagacctgctggcttccgtgcgttattatctggagcatgagtgcgatttgtccgtcatgaaggtgtccgagctgtatgcgcgtctgcgccgcatgctcacagaagtgggcctggaacaccttgcaagggagcttagggaggagatgccgcccatgacggtctgcgtcgcggagattgcccgcagcgtgccgttctggctgttttttgcctgcgagctgaaaaagcaagtggaggaattgcgggggcatggcattaccaggtattgcttcacaggcaggaaggaatgcgtgatggctctccggggaaggaagcgctgggaccgttcctgccagtctctgctggaagacctggacttccttctttcccgctatgaggagcaggcggcggattgttaacggaacttatccgtgccgtattggagtatttagctgcgcaattcaacaggttccgctttcccggctgacggagccggttcggagtgcagcgcgtttctgcttttcgtgagcatgcgaggctatttcactttaccgggaacgggcttgcggggcccgttgatccatgctcgggcatcctgttttgccggaaggcccaataagagttaacaggccgtattgtgccgcctgattcccggagatgagccggatgagggaatgcaaggggccttccctcattttccccgaggttgttatttctggctgtttgcagcaggagcagcctcacccgtaccggaaggccgtgaataaggcagagtgaggtcttgctccctgaccgcacgggggaacggccgctgttacaggtgtttgggcgcagggccgttgatgattttgcgggcccggttcagggcggcgtcaatattctcgcagatattgtagcgtttcagctcccggtaaaagggcgcgtggcggatgacgtccagaggctggggctgcacgccgcaaaccagcagagtggaaccgtgttcccggcactggtggcagaagtcggaaaggacgttcaggccggtggcgtccagcgcgggaaccaggcgcatgcgcaggataaccaccttggtatcatgttccagcgtttccagaacctggtccttgaattgctccacggcaccgaagaagaagggacctttcacgtcgaaaacttccacgccttccgggatgtccagcttggcggcagagcggtttccatcatcttcctcatcattttccagcagttcgtttttgatggcggaaacatcgctgatttgggccatgcggcccatgaagagcagggcggccagcaccacgcctacttccacggctacaacgaggtccacaaacacggtcagcaggaaggtgattaccagcaccgccgcatcctgcctgggccctttcagcagacggctgaacgtgtgtatttcactcatgttgtagcacactaccgtcagaatgcccgccaggacagccaggggaatctgttgggcatagtgggcaaaggccatcagaatggccagcagggtcagggcgtgaatcataccggaaaccgggcttttagctccagccttgatgttagtggcggtgcgggcaatggctccggtggccggaatgccgccaaacagggcggatccgatgttgccgataccttgtgcaatcagctccatgttgggcttgtggcgccctccggtcatgccgtccgctacggaggcgcttaacagggattcgatcgccgccagcagcgcgatggtgaaagcaggggccgtcagcgcccccagggtgctccagtcaatgctgggcagggagggcagggggagcgtattcgggaggctgccgaaggcttgcccgatggttgtcacaggcaacgaaaacgccacggaaacggccgtcatgcccagcatgcccaccagcatggccggtattctgggccagaagcggcggctcagcagggtaatgattacggtgccggcggccagccccagcgccgcccagttgatggtgtggaagtaatggaagtaacacgcccatttttcaatgaactctccgggaattttttccgtgatggtgaggccgaagatgtctttaatttgcgtggaaaagattaccacggcgatgccggaggtgaaccctgtggtgacagggaatggaataaagcggatgagcgcccccatgcggcagaacccaaagatgatgaggaagaggcccgccatcaatgtgcagaccagcaggccggatgcgtggtattgctccaggacgcccatgatgatgatcacgaaggctccggtggggccgcctatttgatatttgcttccgctgaacagggagatgaggaacccggccacaatggcggtgatgaggccctgggttggggagagtccgcatgcgatggcaaaggccatggccagcggaatggctactacaccgacggtcagtcccgcaaaaaggtccgccagaaaggtttgtttggtataagttttgagagaggagagaagagcaggtttgaacatggctgccgggatggttggccggctgcggttgtggccgccgccggcggggttgaagcgtccccttcctgcacccggaggcgccccgcggagacggacggcaggctctcttcgttcccgtccgcctccgcaggcggcgttacttggaaaggatgccttcccagtaggcgatgcggcggcgggtgttgtcggaattgggagcccccgggttggtacgctgggcgaaggcttttgtcaattcaaatacgtcgcgcgcgtctgttccatatgcatttgaaatggaggcgaattgttcatcgctcagcttgttgagcggcgtacccgtggagatgctcatggcgactgccttcccgaccagctcatgggccttccggaaggggaccccgcggcgcaccagataatccgccaggtccgtggccagcagcatgggatcggacgccgcttccctggccctggccgtgttcaccgtcatggcggctatcatttccgcattgacgtccaaggccagtttaaccgtatcaatggaatcgaacaggggttccttgtcttcctggaggtcgcggttgtaagtcaggggaagccctttgacggccaccatgacggcggtgaggttaccgtacagccgccccgtttttccgcgggtgagttccgcgacatccggattttttttctggggcatcagggatgaacctgtcgtatgggcgtcggacagggaagcgaagccgaattccgccgtgcaccacaggatgacgtcctcgctcatgcgggagagatgggctccgactacggccaggtcaaaaagtatttccatgatgtaatcccggtcggcaattgcatccatggagttttctgtaactgcgtcaaaacccagttccacggcaattccgtggcggtccaggcagatggtggaaccggcgatggctccggaaccgagcggggagacgttcaggcgcctgcggcagtccttgaggcggtccgcatcccggtccagcatttccacgtaagccagcaggtgatggcccatggtgacgggctgggcgcgctgcaggtgagtatagcccggcatcatggcatctgcgtattccttcgccttcatgaccagcgcgcgctgcagatggcgcacttttcccagaatttcatcgatttccgcccggcagtaaagccgcgtgtccgtagctacctggtcattgcgggagcgtgcggtatgcagcttggcgcccggagcgccgatgcgccgggtgagttcgctttcaatgttcatgtgcacgtcctccagttcccggctccacgagaagttgcctgcttcaatgtctttcaggatgtctttcaggccggattcaatggcgttgaattcttcctgcgaaagcaggccagccttgagctgggcccgcgcatgggcgatggatccggcaatgtcctggcggaaaagcctccagtcgtaggagacggattcgccgtagcgttgaaccagatcagcggtgggtttagaaaatctgcctttccacatgacccacatgttgtgccccaggagcttccgttttgaaagcctgaaatgggtaatggaggcagattccgcggaactgggaaaaatccgcatgcctggaaaaccggagtggagccggaaaagagagaaacggagcatggctgtcttttccctgtggcggatgggggcggatatgttattacgatgccgtgcgtatggatgacgaaatgcctctgaaacgggaagatttgcggaaacgcgcggaggaaaaggcggcgaaactggctgcggaggggatggaactgtgccccgtaacggtttccgggcgtaccctggcgaaaaggttctgggggaaggaatggatgaagagcctgtccgcgtgcgaggtgtacgggatgcggctggcccccggccggacctacctgcgctatggctgtgttctggaccttaaaacggttcccggccgcatcgatgctctggtgatgggtgaacatttgtatgaggtttgcatccaggcctcccccccggatgaagaggtgcttgcccggctgcgcgcacgatgcgccgggcagattggttcctggattgatctgctgaaagggaatttgtctcccgagctgctggaaatcctgtgcgctccggaaggcggcctgtttcccgcgccggaagagtggcgtttttcctgttcctgtccggattgggcggatttgtgcaagcatgcggccgcagtcctgtacgctttcggcgtgatgctggataagcagccggagttgttgttcaccctgcgcggaatggattcctccgttttgattccgaaagctccggaacccgttcccggaggagaagacgtactggatgtggatgccggttccctttcggatatattcggcatcagcctggattgattattgttgccgtgattgtggttttattccggttttgaatagccaggagggaaggggatggccgtcctttttcatgaactggcggcggatgagggtgcccgggcagtcaggcgtgccgccggccgtttgccaatgtttccgcatgatgctcgcccgggtggagaatgtttccgctttttccatgatgcattgcaggttcgggagggcggaaaaaacgagataaagaatcaggagggcccggtatttcacgtctccccggcggagggcccggagaaagagcagggaaaggaagggatagaggacggccggagctttaaagagaagttcattgttcatgatgcccgtgcggaaaaagaggctgcctgccatcatgcccagcgtgatgtagtacaacgggtttttccggcattttgggaagaggagcgcccccggcagcagtatccccagggccagggccagcaggaagctggcgtatttgacggaatcgggatggagcagaagccgctgttgcccgtaatggtagatttccgcatattttgcatcaaacaggcaggagaattgccctcctccgtccaaatgggaataaaagacggccatgacggccgtgcacagggccgcgagccagaaaaccggctggcccagaagggaacggagacgggaaagcggtttccgtgccgccgggaggcggaacagggtttcatacgccatatacggaaggagcagaagggcgcccagcggggaggacggcagcagaagagttcccgcgagataatacccggagggaggcagggagcgcgtcaggacgaatacggcgcacaatagcgccggaacggcgtgattgaatgtgttgaagagttggacgggcatgccgatgaacaggaccatctgggcatggtattccgcaaacagggaggagaggggaattcccaggcagtccggcaccgctgccggagagccgaggcagaggagtatcagtgcccagcgggccgtcttccggattccccagcggacggttgccgccagcagcgccagttccagcccaagaaaggtccacagggccagtagccagggagcccatgatgccgggcagaaagaagccgccagagccggaggcagccaatggcccaggtagtagatgaaatgatgtccgtcctccgtgacgaggggccaggaatttgctgcaaggcgttcataaacggcattgcggatgataaaatccgcatgttgctggcagtggcccgtgaatccgcacaacagcaccagcatcaggcagaagaaggagaggagacccagcgcggccaatctgcgcccgcttaacggaagcctttgtgccggaagatgccgggcgcagacgtacagcccgcatgccagtgcggcgcaaagcggcgcggaaaaggccggatgcacccatccctgcagaaaaaggaggaggggcaacgccagatacaacagtcccgcgcatagcggaaggcgtgcggacaggaagaagcgggcagacatggcgcggaacgggaaacttatcggcaggggaggactccgaagggtcagcatggcatattttgttccaaagaaaaggatgcagtttcctccggagaatgaaaaagccccgcaccgcctagcggcggccgggggttggcgttgcttgataccagttccagcaaaaaggtcagaacaggccaaatccgttgccgtagcgggcggattctcccagttcttcttcaatccggagaaggcggttgtatttggccatacggtcggaacggctcaaagagccggttttgatttgtccggcgttggttcctacggcaatgtccgcgatggtggcgtcctccgtttctccggaacggtgggaaataacggcggtatagcggttgcccatagccagttccacggcgtccagcgtttccgtcagcgagccgatttgattgaccttcaccaggatggagttgcccacgcccagatgaatgccttttctgaggaattccacgttggtgacaaagagatcgtctccgacaagctgagtgcttttgccaagtttttccgtcagggttttccatccgtcccagtcgttttccgcacagccgtcttcgatggagacgatgggatattttttcttcagttccacatagtagtccgtcagctctgcggcggttctgcggctgccgtcggatttcttgaaaacatacagcccggattccggttcataaaattcggaggaagccacgtccagggcaatggaaatgtcctccccgaaccggtaaccggccttgtctaccgcctgggcgatgcaatccagggcgtcttccgcagagttcagcctgggggcgaagccgccttcgtcgcccacggcggtggaaaggccgcggtcatgaagaacggatttcagcgcatggaaaacttccgcgccataacgcagggcttcccggaaggtgggagcgccggacgggacgatcatgaattcctggaagtcaatgggcgcgtcggagtgggcgccgccgttgatgatgttcatcatggggacgggcagaaccttggcgttcgggccgcccaggtagcggtacaggggctggtgcagctgggccgccgcagccttggcaagcgccagggaaacgcccagaatggcgttggcccccagtttggctttgttgaacgtgccgtccagggagttcatgagggcatccgccgtggtttgctccgtggcttccagaccgatcagggccggagcaatgatgttgcggatgttgtctacggccttggtgactcccttgccctggtagcgggttgcgtcgccgtccctgagttcccaggcttcgtgttccccggtggaagctccgctggggacgcccgccgtgcctacggcgcctccttccagataaacgtccgcctcaatggtggggttgccgcgtgaatccagaatttcacgccctgttattttcgcgatgcgcatttctttcataaaaatcggatgggttcttccttggaaaccagatattgaaattagctcaaactaacttatgaggcttgtgtatcctgtatccgaagcggatgcaagctttttctccgggagaaagaccggagttcaatcagtatgggtgccccttggcggcggttcagttgcggtaatgttccttcagccacgttatttcttcgccgtgtccggcgtcgtccctgggcgtttccaggaagaagggcaattcccgcagaacgggatggttgatgatgttgatgaaggcctgttctcccagggaacccttgccgatggtttcatggcggtccttgaaggaggagaagggcgtcatgctgtcattcaggtggatggcgcgcaggcattccaggcccagcacggcatcaaaatgttccagtacggaatccagcctgttgacgatatcatatccggcggaataaacatggcaggtatccaggcatacgccaagtttgcccttcaggtccacccgctccatgatggcggccagttcttcaaaggtccggccgacttcgcttcccttgccggacatggtttccagcaaaacaatggttttttgttccggtgaaagcacgccgtttaactggttcgccaccagttcaatgcctttttccgctccctgccctacgtggcagccgggatggaagttataaagatttcccggcagatgttccatgagttccagatcctctttcagcacctgggctgcaaaacgggcgacgccggggtctgcggaacaggggttcagcgtgtagggggcgtgtgccagcagcgtgccgaacccgttgttccgcgctaattccagaaaacgggcaatatcctgttcgtcaatagttttggctttgctcccacgcggattgcgggtgaagaactgaaaagtattggcgccgatggagagggcaacccggcccatggcttcatagccttttgcggaggagaggtggcatccgatgtatggcatggcggtaaattcggaatggaaaggaaatttatcaatgccgcggagaggaagagaggctaaaaggcctgcatgacttgatcggaaagaataagaccgtcagaaacgtacgatgagttaaaacgatagtgattgttggtaatgaatttaaaccagttgattacggcggacgtattgggaggagctctgtgcgcgacctgttttgcagaggccgggccagaggatgttttaacgccgttgacgcctgttccttccgcggcgcagcttgaatggcatgacatggagatgtacgcctttatccattttacaattaatacttttactggaaaagagtgaggctatggagacgaaaagccggagctgtttcatccttccgatttcaatgcggacgaccttgtcaggacgctggcggacgccgggttcaaaggggtggtgctgacctgcaagcaccatgacgatttctgcctgtggcctacaaaaaccacccggcatagcgtggcggcctccccgtggaagcaggggaagggggatgtggtgaaggaggtgtcccgcgcgtgcggaaagtatggcgtcaggttcggtgtttatctgtctccgtgggaccgcaatgccgcctcttacggcacgccggattatatccggatgtaccgtcggcagttgaaagagctggcgacgggatacggtcccattttcctggcttggtttgacggagcgaacggaggggacgggtattacggaggagcgcgggaaaaacgttctatcgaccgtagcacgtattacgactggaagacaacttggggagagttgaagaaacggcagcccggagccgtcatcttttccgacgtagggccggatgtccgctgggtaggcaatgaaagcggctatgcgggttatccctgctgggccacatacacccctgttccgctgcaagccgggacggaacccgcgcccggcgccgtgcgctaccggctgggcacggaaggcaccatggacggcaagtactggattcccgcggaggtggatgtttccatccgcccgggctggttctggcatgagcatgaaaattcccgcgtccggacgccggaaaatctgttgaagttgtattttgacagcgtaggcagaggggccaacctgaatttgaacgtgccgccggaccgccgcggccgcattcatgaagaggataaaaagtctctggcgggcttccgtgtgttgctggatgaattgtattcccgcaacttcgcctccggggcacaggttgagtcctcctcttcccggaaagggcacggtgcggaacaggttctggaccggaaacggacgacgtactgggtggccgctccggaagataagcatccctgcgtggtattgaaattgccgaagcccgcggcgtttgacgtcatccggctggcagagcccatccaactggggcagagggtgcgcaaattccgtgtggaggtgcgtgagaacggccagaggagcaggtgggcggagggagtcagcataggagccagagttcttctgaaaggaaggcccgtgacggcggatggagtgcgcgtggtgctggaacaatccagggccgttccggccctgtgcgaggtttctttgtggaagtatcccgtcatcctgaatgctccggcggtgagttatgaccgcaatggacgggtgaccctggcttccgcggagaacgtggtgatcaggtacaccacggatggaacggagcctggtccacagtccgccgtgtacaggaatcctttccttctccctgccggggggacggtaaaagcggcggccgaatatcgcggcagaaaatcttccgtgaccactcagctcattcctgttcccacgcgggactggaaagtggtgtccggggaaagaagcgccgccgctccggaactggccattgacggagattcttccaccctctggcatacgcatgccgcccagggagagctggctcccccgcaggcgctggagattgacatggggcgtccggttaacgttgcctccgttatttacacgccgcgcagggattcggcaacgggaacgattgaccgttatgccgtctatttgagcgcggatggaaacacatggggcgctcccgttgcggagggggagttctctaatatccgcgccaatcccgttccgcagcggattgacctgaaagcgcctgtcaaagtgcgttatctgcgttttgtaggcaagcgggtggtggaaggcagccatgttgccgttgccgagctgagagtattggaaaaataaacggtttcctttttttattatcgtaatcctccggcgttttcttgacggatggagggaagaggggcaagatggcacgcatggaacaagtcagcctcatggagttgggcaagctggccgcggaaggccaggttgaagcggaagtttttgccgagatcgcccagtgcgcgcagaagatgaccaagggcaacaaaccgtatctggatgtgtcttttgccgatgcggaagggaccatgggattgaaggtgtgggaggataaaccctggttccggacgcttgcttccctgccccttcgcagtttcgtgagcctgcgcggccaatgggccaagggagggttcggcatggaggtttccgacctggacgtgcggttgctggacgaacaggaaaaggaaagctttctggccggttccggaaccttgaagaaaaagcaggaagctgatctgaaggaaatttgcgtgctcatcaagggcatgaatgatccgcgcatacgcgccctgtgcattgaattcattgagcagttcggggaacgcctccagcgcgccgccgccgcccgcacctaccatcacgcccgccgcggcggactggtggaacacgtggcggggatgatgcgcacggcctctgccgtctgccaggcgaatccggggctgaaccgtgaccttctgttggccgggtgcctgttccacgactgcgggaagttgtgggaaaactgctacccgaaggaggattttacgatgccctattcggaggccggagaactgctgggccatattccgctgggcattgaactggtcaacaatttgtggaagcgcatcatgtcccttccggaggcggattcctggaaaacgctggaccctccttcaccggacgtgcgcatgcacctgctgcacctgattgcgtcccatcacggggaacttgccttcggctcccccgtgtttcccaagacgccggaggcggtggccctgcattacatcgacaatctggacgccaagctggaaatgttccgcggagcttatgagacgggcgaggccctggctcccagagtgctccagcgcaaggcccccctgcctgccaacgttgttcttccgctgccttccgttctccctctggagccggacggcgaagacgctctgccgtaaggttccccctgcatggaagaggttcggcgtgttcttcgtccgtggccggaacggatgacggcatctgctcccttgctgattccggctttgtccctgctgtgcgcttgcgcggccatggatgtgtccctttggttctggcttccatgcttctgtctggcggcgttgccgtgttttttacatgcgccttccatgggggtgcttgccgctgccctggcgatgtgggccgccgtatatcttttcgcgtatgaacgggaatacgcaggcgttcccgtggaagcggggagagccatggtgatggaaggctccgttgaggctgtttccggaaaatccgtattgtttcgtccggatggttcccggtggctgtacgcggtttcctcccgtgacggggcctgccctctggaggcaggggaacattaccggattaaaggagaggcgtatccgcttcaggcgccgtgcggtcccggcatctttgaccgggagcggtggggttacctgcacggcatcatcgccggaatccggctggatgagtactgccggaacgggacgggagactggcgcagccgtttccgggctttttccctgcggctccgggaaagggccgcttccctgctcagggagggcgcccctccggatgatgaggcccggcaggtgatggtttccgccgtgcttggggacaagacggacgcgaggccggaaacgatggcgaagtttctggaaagcggctgcatgcatgtattcgccgtcagcggcatgcatgtgggcgtggccgccatgctggttctgggtatgctgaggctcctgcatgtgcgtccccgtgcggcccggctgtcctgcatcctgttgctggcggcgtacgtgttcgtgaccgggatgtccgcttccgccctgcgggcgttcatcatgacgtcagtctggcttctggcgttcgtgctgcgcagaaaggggcatccggccaatattctggcgctcgctttcatcctcctctgcttgatgaacccgctccaggttttccagccggggttccagctttctttctgcgtttttgccgccattgcctgcctggcgggatggttcagccgggaaaagcccctgtggtcgccggacccgttcatccctccccggatttaccatgcgcgggaaagattcctggtgcggctggaaaaagcaggccgcggcgcgctgattgtctccgtgggggcgtggctggcctccattcccctgacggcatggcacttcggaacctggaacctgtatgctcctctgaccaatttgtgcctgagcgtctttgtctttcccctgatgggcgtttccctgtccgggctgatgttcgcgtggtgcccgtggatgctgcatgtttgcaatacggccgcttcctggctggcgtccgccatgctggccgtagccgggggagtggcttccctgccgtacagttatctttcttccgcaccgccttccggggaaaatgaagctgtgatcgttcccttgcagaaggacgcctggtccgcagtcatttccaatcccgcactggttgtgggaagcgggacagaagatgcggtgcggtacaccctccttcccgtgctgaaggcgcgcagtatccggccctgcggcatgttgtgctgcgggagcggcaaggcggaacgggccggggagaaagaactggagaaggaatatcccggaatccggaactggggcgcggagtccggggaatgtaccgtccggcaatggaggttacggccgggcaatgaacttgtgctggaagattttcctgtaccgttgcgcacgggaatccgtcaggaccggagccgggtgttgtcatgggaatgccgcgggcggcggttcctgatgatagggaatgccgggttttcctccctggcgcgcgcggaggaaacaccgcgggcggatgtattgctcatcgggcatcatccgcgcgatccggtgaacagcgctgcgtggatcagggctacaggcgcccgcgcggtcattttcgcgacggagtatgaatgccccgttccggagggaacagccgtgtaccgtctccgggaaaccggaaccctctatctgcggatggaggaaaagggcgtgcgaatcatcccctggaggggcatggaacgccgtacagggtgaatcccgtgctttcctcaatgcggatgggaaggatctctcccgccaggtcaggggcggcatccaccatgacgggtttgttctgggaggttcggccggagaggcgcgccacattcgttttagacgacccttccagaagaacttcctgcacggtgcctaccagatcccggtttttccggatggctatttcattgactacggccagaaggtcctggttgcgcgcttccttcacttcctccggaatctgattctccataacggcggcgggcgtgccgcggcgcggggaatagcggaaaatgaacgcgttgtcaaactggacctgttccacggcctgcctggtcagcaggtaatcctcctccgtttctcccgggaagcccacgatgatatccgtggtgatggataaatccgggcgtgcctgcttcatccgggagcaaaggtccagataggtttcattcctgtacggcctgcgcatcattttcagaatgcggtcgctgccgctctgcatcgggaaatgaatatggctgcacaacttgggaagataggtgaatgcctgcaccagatcctggcggaaaccgatgggatgcggggagacgaagcggatgcgccggatgccttccacttcatgcacggcttccagcagctggacgaagccgcccttgccgtctgccgtttccatctgcctgccgtaccggttgacgatctggcccagcagcgtgacttccttcacgccggcgtccgccagcatcttcacctcatccaccacgtcccggatggggcggctgcgttctgcgccgcgggtgtagggaacgatgcagtaggcgcacttcatttcgcacccctgcatgatggagacatacgccgtggagcgcgcgccgggattcaggtggtcccggatgcggttctgggagtccgcctcttccgccacatcgcacacatgcgtgccggaaaaggcggattgcaactcgtccatgcggcgttcctggcgcgcgcgcagaatgccgtccacatgttcaaacacgcggtggtatttctgggtgccgaccacgaggtccaggcgcggcagttccttgaacagttcctcttttttactttgggccatgcagcccatcatgccgtacactacatgcggacggtgccgctgctgcttggccagaagccccattttccccagcgccttttgttccgcctgttcccggatggaacaggaattgaacaggatgacgtccgcctcatcctcgcggtccgtcatggtgtagcctttctgcacgaacatgcgggccacctgctcggagtcccgttcgttcatctggcagccgtaagttttgatgtaaagcttgggcatggaaaaaatcaggtattttttttcagggtgaccacgcattccagatgcttggtctgggggaacaggtcaaagggctggacggcggtgacggcatacccggctttgtcgaattccgccagatcccgtatctgggtggctgggttgcaggaaacgtaaacgacttttccagggccgaaggtgaacaactgggtcaggaattccatgctgcaccctttccggggcgggtcgatcaccacggcggttttttccgcggggaaatccacccgggcaaaaatggccccggcgtccgccgccaggaattccgcgtgttcaattccgttgctgcgcgcgttgctgcgcgcccagtccgcagaagtctcactgacttccacgcccagcacttttttaaatttcttcgccaggctcagggcgaacaggccggaaccgcagtaagcgtccaccaggaattcctccccgtccatactcgcctgttgagccacgtaatccgtaaaaagcggaagaatgaaaggattattctgaaaaaagtctcccgccagaaaatgaaactccaaatcgcccacccgttcgcacgccacggcgttgttattggtgatgacggttccttccgaggcccggagcaggatggtggctccccgcttgaaccgggctgcggcctggtaaacgcttttgcgtgccaggggcagggcttcattgatgcactccatggcaatcgggcattgcggcacgtccaccacatcccttctggagcctgctttcagaaaaccgatggccggcttgcctccttccttcggcttgtcaaagtggggcgtaatcttggagcggtaatagtattggcggggagaggctatggccggattgacgggcagttccagccctgcctgcaggcggagcagatccgctacctgccgggttttccagagaagctggcggtcataggaaagatgctggtactggcatccaccgcaggttccgaacaggcggcatcccggttccacgcggtccgggctggggttaattatttccaccagatcggcggaggaatagtttttatcattacgccagacgcgggctttgacacggtctcccggcagggagaaggggacgaaaaccacccatccgtccacgcggccgatgccgtctcccgcattggaaagagcgtcaatatccagttcaagctcctggtggtaggaaaaaggttcggggtggaagcctttgggaatggtcgcagtcatggtggtgggaaaagattatggggcggaaggggtaatcagtttgccgtccagatcgtacaacagggtttccggcagccggggggtgcgcagtccggggcggaaatcgcccggcaagacagccggccccggagcggactcttcattctcatcctctggaagaatgtcctgttgcgccggagcgggagcccagggagcgggatggtccgccggggcggtttgttccggctgaacggctggaaccggggcggggtcctgaggcgccgtttccttgttggaggtgcaggaagaggtccaggccagcccggcaatcagacaggagcggatcaggagctttctcatggcgcggattcttacagcttcattcggacttggcaagtgaatagccctgctatggttcatgtaaggggcatttcttttttcctggaacccggagaacgcttgctgtttgactatccccggatagtatttatagtaggaacacgtatgaggcctttcctttttttatgttgttccgctgcggtttcagggctgtttgcccctcaggccggcatagctcaacagcgtcctcccattttcgggtttgccaataaaaacaggatacctgaagtcaataaatcgggcagccccgtttttgacaaactccgtaatgaagctatgaagaaaaagctgccgctggtgatttacctgaccggttcttcatggtgttcccggtgtaatatttttaccagggaatatattaaaaaaacaaatttcaaaaatgccgccgggaagaaatttatattctggctggtggacaccaaacaggtgccgggcaattccccgggaacgtttaaattcaagatggttccggaagaagccgcaaaaatcgtggggtgtgcggattctccccgtgcgccgtatgtggttcttggccctcccgccgtgtttatcattgaccctgtttccggagaattgatcaagagcctgttcaccaaaagtgaagtggacaagtatggaaagcctcttgccggaattattgaagaagcctggaataatcatgtaaaccggaagaagctgaatggaaatgcttaatggcaaggtatccgcgaagccaaataatgacggcggcaaaagcggaatgatgaagcggaacggttttaaacggttatccgttgaaaagtgatttttgacgcgtaacgccgggaatggcagcttatggtttctgttggtttatcaagtcctgacgtgttgatattttaactttgtaatctgaattaagaataattttaattaatatgaccagtataaagcaaagagacgaattgcaatctactatttggaaaatcgccaacgaagtgcgtggcgccgttgacggctgggattttaagcaatttgtcttaggaactcttttttatcggtttatcagtgagaacttcaccaacttcattgaaggcggtgacgagagcgtcaactatgcgaatatgccggatgacgttatcacccctgagataaaagatgacgccaccaggacgaaagggtatttcatctatcctgctcagctttttgtgaatatagcaaagaatgccaacaacaatcctaatctgaacacggacttggcagctattttcgatgcgatagagagttctgccaatgggtatccgtccgaacacgacataaaagggctgtttgccgactttgacaccacaagcaaccgtttgggcaacaccgtggaggagaaaaacaggcgtttggcggcagtcatcaaaggtgtggaaagccttgatttcggtaattttgaagataatgagatagatcttttcggagatgcttacgagttcctgatttccaattacgccgccaatgccggcaaatccggcggagagttctttacgcctcagaatgtatcaaagctgatagcgcgattagctatgtcgggattggcttccgtcaacaagatttatgatccggcttgtggttcgggttcgttgctgcttcaggcgaaaaaacagtttgatgcgcatcttattgaagatggctttttcgggcaggaaatcaaccacaccacttacaacctggcgcggatgaatatgttcttgcataatatcaattatgacaagttcgacatagcgctgggcaatacgctgctcaatcctcaatacggcgatgaaaaaccatttgacgccatcgtctcaaatccgccatactccgtcaattgggtgggaagcgacgacccaacgcttatcaatgacgaccgctttgctccggcaggggtgttagcgccaaagtcaaaagctgattttgcttttgtgcttcacgccctcagctatctttccgccagaggcagggccgccattgtctgcttccccggcatcttctaccgtggcggcgcggaacagaagataaggaaatatcttgtggacggcaactttgtggaaacggtcattgcgttgcctcccaatctcttctatggaacgggcatctccgtgaatatcctcgtgctgtccaggcacaaggctgatacgaagacgcagtttattgatgccagcggggaagatttctttaaaaagcagaccaataacaatgtcctgacagatgagcacatagaaagaatagtcgatatattcgacagaaaggaaccggtggaatatgttgcggcattagtagataacagcaagattgcggagaatggctataacctctctgtgagttcatatgtagaggcgaaagatacgcgcgaggcgattgatattgccaggctgaatgccgaggtaaagcaaacggtgaagaggatagatgcgctgcgtgcggatattgacgcgattattaaggagttggaggatgaataatgagccggcaataacaggaacggcttttctgaccgatgtagtcaagtagatgttaaagggaggtgacataaaatgagtagactagacgagctgatacaggagctttgcccgaatggtgtagaatttattgctattggtgaagtagccgactatgaacagccatcaaaatacattgtaaatagtacagattataatgataattttaaaatacctgtacttacagcaggacaatcctttattcttggatatactgatgaaacagatggcatttatgaagcatcaaaagataatcctgttattatctttgatgatttcacaggagcactcaaatgggtggatttcccttttaaggtgaaatcttctgcaatgaaaatgcttaaagcgaaacctaaaaaaataactttaagatacctctttcatgtcatgggaaacataggattcacttcctctgaacacaagagattatggatttctgtttattcagcgtttgaaattcctttaccaccacttgaggtgcagagtgaaattgcccgtattctggacaatttcacggagcttacagcggagcttacagcggaactggaagcgaggaagaaacaatatgaatattaccgtaatcagttattatcatttcccgataataaagcaaccgactgaatatggaaaaaacattgacagaaatagctcaagagctaaaaaacagtccaaagaaggtccagcttatctatgcctttaacggcacaggaaagacgcggctgtctcgcgcattcaaagagttggtgtcgcccaagcatgaggaagaagaagcgcaagacggggatactggcgtaaaagtattgtattataatgcttttactgaagatttgttttattgggataatgatctggccggggatacaaacaggaagctgttggtacgtcctaatgcctttactgactgggtgcttaaagttgaaggacaaaccaataatatcataacagatttccagcattatactaatgataaactgactccatgtttcaatgaaggttataatgaggtttccttttctatagaaggcggcaacgaagagcaaattgataatatcaaaatatcgagaggcgaagaaagctgttttgtgtggtgcgtgttttacagcctgctgaaagaggtagtcgaagtactgaatgattcggaaccggaaaaccgctcgacaaataagtttgatgatttggaatatatattcattgatgatccagtaagttcgctggatgaaaatcatttaatagaattggctgtcaatatagcagaagttataaaaagtagtgattataatttaaataaattaaaatttatcattacgacgcacaatcctttgttctataatgtaatttataatgcattaaaggctgaggcaggctatatgctaagtaaatatgaagatgggacttttaaacttgaagaaaagaaaggagattcaaacaaaagtttttcctatcatcttttcctaaagcagactatcgaagaggcgcttgattcaggcactgttcagaaataccatttcacgctactgcgcaacctttacgaaaaaacggcaaacttcttagggtatccccaatggtctgatttgttgcctgatgacaggcgaacctactataacaggattattcagtttacaagtcactctacattatccaatgaagctgtggcggaaccgacagaagcagaaaagcaaactgtgggatttttattaaagcatttaattgataacaagtactggaaagaggatctgcaatgacacaatacagcaccatagcggaattacagaactttatcgttctcgacagctacaccaggagttcaatagtaaacgagccgcacgcaggttatcagacagaggcggctttggaacgtgaattcatagaagacttgatatcacaaggttacgaatatgttcccagccttgttacgcctgacgccctgctctgcaatgcgagaaaccagttgcaggcattcaacaatatcgtttttaccgattctgaatggggtcgctttctggaggaatatctggacaagaagagcgacagccctgttgaaaaaacgaaaaaaatacacggtgattacatctatgactttgtgtttgatgatgggcatattgagaatatatacttggcagacaagacgaatattgcccgcaacaaagtacaggtgattaatcagtttgagcagttcggggaacaagcgaaccgttacgatgtcacgatactggtaaatgggttgcctatggtgcaggtagagctgaaaaagcggggagtggctatccgcgaggcttttaaccaggtgcatcgctacagcaaagagagcttcaacagcgagagttcactttataaatacttacaggttttcgtcatctccaatggtacggacacccgttattttgccaataccgtaaagcgcgataaaaacagttttgactttacgatgaactgggcgaagtcggacaatatgttgattaaagacttaaaagattttacggcgacatttttccagaaaaatacgctgctgcaggttcttttcacatattcggtgtttgatgccagtaacacgctgctcatcatgcgaccctaccagattgcggcaacggaacgcatcttgtggaagataaaaagttcttatcaggctaagaaatggagcaatccggagggaggcggatacatctggcacaccacggggtctggcaaaactctgacgagttttaaggccgcacagcttgccacacaacttgattttatcgacaaggtgttctttgttgttgaccgcaaggatttggactatcagacgatgaaggaatatcaacgtttctcgcccgatagcgtcaatgggtcagagagcacggcaggattgaagaggaacatagagaaggatgacaacaaaatcattgtcacgaccattcaaaagctgaacaacctcatgaagagcgaaagcgacttgcctgtctatcaaaagcaggttgtatttatcttcgatgagtgccaccgttcccaattcggagaagcgcagaagaatctgaaaaagagattcaagagatattaccaatttggttttacgggtacccctatctttcctgagaatgctttgggggcggagactacggccagtgtgttcggccgtgagctgcattcgtatgtcatcacagacgccatacgtgatgaaaaggttttgaagttcaaagtggactacaacgatgttcgtccacggtttaagaatttggaaactgaaaaagatgaaatcaagttgaatgcggcagaaaatcaaaagcttttgcttcattcagaccgaatcaaagggatttcccaatacatcttgcggaatttcaggataaaaacacatagaacgcaagggaataacaagggctttaatgccatgttcgcagtaaacagcgttgaggctgccaaactgtattatcaggaattgaacaatctgcagaaagaaagtgacaggcccctgagaattgtcaccatattttctttcgccccaaatgaagaacaaagcgctaagggcgatatcaaagatgaaaattttgacccttcggcaatggacagcagcgccaaagagtttttggcaaaagcgattggcgattacaacgtgatgtttaaaacaaactttggagtggatagtaaagagttccaaaactattatcgcgatttggccaaaagagtaaaaaaccgggaagttgacttgctcattgtggtcggtatgttccttaccggttttgatgctcctgctttgaacactctgtttgtagacaagaatctgcgttatcacggtctgatgcaggcgttttcacgtaccaatcgcatctatgacgcaaccaaaactttcggcaatatcgttacattcagggatttggaacaatctacaatagatgcgatcactctgtttggagataagaacacaaggaacgtagtgcttgaaaagagctacaaggaataccttgaaggatttaaggatattgccaccggcgaggcgagaaaagggtatgtggaagttgtcatggaactgaaagaaaaattccctgccccggatgagatagtgacggaagcagataaaaaatcctttgttaagctgttcggagaatatctacggatagaaaatattttacaaaactacgatgagtttacgcagctcaaagccctgcaaaaaatagacaaagagaatcgtgcggctcttgaagcgtttaagaatgccaacttcttgactgatgaagatattgtagccatgcagggcattgatgtactgaaagagcgaaccgtacaggattatcgttcgatatacaatgatatccgagactggttcagacatgagaggaacggtaaagctccggaagattcaaaaatagactgggatgatgtggtttttgaaattgatctgcttaaatctcaggaaatagatctcgactatattctcggactgattttcgaacacaacaggaaaacgaaggacaaacctgccttggtagatgaggtgcgccgtgttatcagagcgagcatcgggaacagggcaaaagagagcctcattgttgattttatcaatgaaacggatttggaaccgattcgagataagactgatattattgccgctttctttacttatgcccaagagaaacagaaaaaggaagctgctgctctgattacggaagagaaactgaacgaggaagctgcaaagcgatatattcaaacatctttgaaacggaagtacgccagcgagaacggcgctgacctcaatgctattctgccgaagatgagtccattaaatcctcaatatctgacgaagaaacagagcgtctttcaaaaaatcgtcgctttcattgaaaagtttagggacatcggaggtcaaatttaatacctgcacacgggcaagctgcccgattttgccgccctcatccggcatcatgaggtattactcttctaaaaacggtaaatgaagcgcagccatggctggggagtgccggaatagtagggataccaccggtgtccggggtggtgcatagtgcggccccattcatcctgacggcgcgcctggggcgcatagaaaagctgtttccattcccggctggcgaaggaagaagattctgtttccgaagccggaggcgccagaaactcctggagggcgctggaagaacagcaataatagggaatgttgaaccggggcgccagtccgaacgccaggagaagccatatccagacgcggagaccgggatgccgcgtccaggaggaagccagaaaggcaagcaggcaggccatgaccggaacgcttcctttgcaaagcaggtcattgacgtctccgttcacgtaaaagaaaggcagaatcaggccggttgccagcgtacagatgaagaggggattcttgcggaaatcccgccagcagaacagggcgtacagcaggaatgaggtcgccataagcaggaaatcccccggatgcgtataaaaaggccgcatgcccatgtgggaggatggcgcgtttaccgccccataataaagaagaaaacacgttcccagcagaacggcggccgaaaaggaaggatggagcaggacatcccggagagggaggacgcctttccattggcggcgccactggcaggccgccaggggcagccctccaagggccgcgaggggggaataaaaggccgtggctgcgaacagaagaggcatccagtacaggggcatgcgtcctgaagccaggaagatgaaaaagagcagaacaggaatggatgcgtttgcgctgcacatgatttgttccgctgtaccaaaataatgcaggcggaacagatccagccccagccagcactggaaattcagcagagagccgaatgccgccatcagcagggcgagcagcagggagcggcgtccggagaaaacgcagagccacagccaggaaaggaacaggccccaggttccccacagaacgataagcacgcgcgcggcgtccagccccgccagttttcccgccagggctggaaccagccagaaccccgtgttgtaaatcagcacgttcccgtccggaaagatgacaggccacggactggcgaccaattcacgcagacaggcatttctgacgatatggtcagggtgctggttgacccactccccccagccggaaagcgccatcagggcggcaaacgccgccagggcgagaaatgaagagcgggtgaacagggggaaggcggggagagaatcccttgtttgcggttccttgcgttctcggggcgccagtcccgcagccgtcaggagcgtgagagggagagcggcgtaccagtgcatccacccggccaggaataccagcacgggcagcagaagccaggcgcaggtgtgccacttcagcgcggttgcgttgaacgcttgttccgggcacggggcatcagcggcagggggaggcatttccccggaaccttaatggggctggtccgcgggggcaaggaggaaactcgcagaccggaacggaagggggcatttgtatgggtatggtggcaggaatgagcgcgcgccgttgcctctttaccggagaaacggggcaggtcatgctgggaggcctatgaataaaacaaaatttatcagggagctccagcgtgagctggggaaggacgttacttcccggcaggcggaacacgcgttgaacgcggtgctggagacgattgcgcggtcggtccggaggcggtcgctggtgaaattccggggctttggcactttccgcgtcaagcgccgccgcgcccgcatcgtacgccatccggaaaacggcggcaggctgctggtgcatgaatcgaaaaccatgaaattccgcccctcttcccttctgtggaaggagtagggaagccgttcggcagttcctgtcattttgccattgacttccccgtccgcggaggcccttaatgtggataaggcaggaacatttttgcctgcctgcataagtaactggccccttccacgtttgccgattatgactccggattccgttcatttgctgacccgttcctcccagatgaccctgtgcaaagatgaacagggccgtgtgcgccgcgcctattacggcccgaggctgcatcagccggaggatgccctggaaaacgccgcggatgctcctctcctgtattcctccctggcggattccgtaacagggcttcccaatgcgtccggcgagtactgcatttgcgtgacccaggcggacggggccctttccctgagtctggaatgccagggttgggaagtgctggaactggatgacgaccgggaagaagccgtcttctatgggaaggacccttcctaccctgtgcgggtggaaatccacgtgcgctcccacagggaatcggacacctttttgcagtgggcggttgttcggaacgaagggaaagaaggcatccgcctgcaccgcgctgcgtccgcacaactgggtttgcgcgcagaacggtacttcgtcaccagcttccgcggcacctggggcggcgagtccctgatgagtgaggaagaagtggcccgggggcatgaacttgccctggtatccggaaccggcacccgcaccgcccaggagggaagccccggattcatcatctctctggacggtccggcgcgggaggattccggggaggttgttctgggggcgctggcatggtccggcaattaccggatatggttccggcacagcccgtatcattacctttttgccggagcgggactggatacggctcccgcgccctatctgctggacggcggcggcgtgtttgaaacgccgcccctcattctgacgcacagtaaaaacggcaagggagaggcctcccggcgcatccaccgctgggcgcgccgctacggcctgcgcggcggaggaacagagaggccaaccttgctgaattcctgggagggggtgtattttacctttacggaaaaagtgctgcacggcatgataaaacgtgcggcggacttggggatagagcttttcgtgctggatgacggctggttcggcaaccggttcccccgcaatgacgcccgcgcgggattgggggactggcaggtgaaccgcgctaaattgccccatgggctgaaaggccttatccgccatgcggaagaactggggatacgcttcggcatctgggtggagccggaaatggtgaaccctcattcggagctttatcagaaccatccggagtgggtcatcggtctcccgcatcgggaaaacaggcaggaacgcagccagtatttgctggacctgagcaatcctcatgtatgcaggtacattcttgacgccatgcggaagctgcttggagaacatccgggcatttcctacgtcaaatgggattgcaaccgcaaaatttccgaccccggctctccctggctggacgcctgccgccaggggaatctgcccattgactatgtgcggggctatgaacacgttcttgatacgctggcggcggaattcccggatgtgacattccaggcctgttcttccggcggaggccgcgccgactatggaaccatgcggaggcatcatgaattctggacgtccgacaatacggacgcttatgaacgcgtgttcatgcagtggggcataggccacctgttcccggctctttccatggccgcccatgtgacagcctcccccaaccaccagacgggccgctccacgccgctcaaattccggtttgacgtggccatgtccggacggcttggctttgaactccagccatgcgacatgacggaggaggacatagcctttgccaaacgtgctctggcggaatacaagcgcatccgtcccgtagtccagttcggggacttgtaccgcctatcgtccccgtatgaaagccgggtggcctccctgatgtatgtatgcggaaaacgggctgtcgttttcgcctggctgatggataaatggctggcggattcccctccacccctgcgcctgaaaggcctgaatcctgccgccaggtacctggtgcgggaaatcaacatgaatgaagacggctctctcacgaacgttcacgaacaggtgctgggcggcgatttcctgatggacgccggcatccgcatccgctggaaaaaggccttccagtccgtctgcctggaggtggcggaaacaaaccctgatgctccggcttcatcatgaaatcggcgtttggcgtgggagccatagccgccttactgatgtgatgagttaggagttctcttagaggtgagggtatacagccaatgcggcagaagacaggcgcattccaatgccggtttgccgatgttcttctctttttctacaggaaaaggtgatcattcaatcttgatgaggccctccctgatgagccgggccgcttcccgttctatttccttttgatgttgtttcatgtaggcctggtacgcttcctcaatatcgaaacggatggtcaggacccattcttcatcttcgttttgcaaataaaactctgaatagtggcggccatccatgacatcatgttcctcgcccttccctctgatgcggtaatctggataatgtttttttatatattcccgctgtttttccaggagcttgtccaaatccttctcattaaacacagcgggattggtgatgacaggggtatctttttcttcttcctgctgctgtgcgtccggctgccgcggctgttcttcctgcgctgcaattgggctgatgaacccgggcaggcaggagacggatagggcgagtatggttgatgcaggcttcatgatgctggtcaggcggcgtgcggtttttgcctctcccttttatacaggaagcaatcagattattcaatttgaatgacgccttccctgatgagtcgttccgcttcccgttctatttccttttgatgttgtttcatgtaggcctggtacgcttcctcaatatcgaaacggatggtcaggacccattcctcatcttcgttttgtaaatcaaactccgaatagtgacggctgtcaaaataatcctgctcttgcccctctatgacgattttgtaatccggataatgtttttttatatattcccgctgtttttccaggagcttgtccaaatccttctcattaaacacagcggggttggtgatgacaggaatatctttttcttcttcctgctgctgtgcgtccggctgccgcggctgttcttcccgcgctgccgcgagacttcctgttttcagcataaggaaaaacagaacaatgcccgtggtcgcgacgaatttcagaggatgattcatatggaattctgttatggttttttccttgggaaaacaagaaaggtcgtgaacgttccaatgctggttcgtgtttcctcttcgttacaggaaaaggccgatcattcaatcttgatgaggccctccctgatgagccgtgcggcttcccgttctatttccttttgatgttgtttcatgtaggcctggtacgcttcctcaatatcgaaacggatggtcaggacccattcctcatcttcgttttgcaaattaaaaaatgaatatcgatgaccatcagaataatctgtatactctccttcagcccagatttgataatctgggtaatgttttttcacatattcccgctgtttttccagaagcttatcaaaatctttctcgtcaaaaatggtaggattcataatgacaggaatatctttttcctcttcctgctgctgttcgttcagctgccggggctgttcttcctgtgcctcaatctggctgatgagccccaacatgcaggagaaaaatatggcgaatatgtttgatatggatttcatgtttctgttcaggttattggtggtttttgcaatcttcctttaattgtttttttaagagattactaattttatttattccttcctttactacataaggaatatcttttggaggatggtagtccactccggaccgggatatattggtcatgtggcctattttccattctgattctacctttccgtgatggacaaaccgatagatataaacgatatgcacgtggcggaaagccttatccgttttcagattttcagccagggtaaggaggccgctcgcttttttgatggcctggacggctatttcgctcaatacttttttggagatttttcccaatcctttttctgccgcgcccaacgcagccggtttggaaccgctggcggtagtataggagataaaatcacctagttcggccttgcactctgctgaagcgggcaggaagctgaaagagcaaaggatcattgccgcgatatatggccatattcgtatggatggtttcttcttcatatcaatttatttccgtggagccgggtttcattcccgcgttcttttccgttgaggcggaaattttttcaataaactcttttccctctctgtttaacttcccatccccccagatgcttaacagggtttgataggtttccacatagtatttttgcgtcttatccctttccgtcaacgcttcaatgactctttgcatcactttgaccgaatattttttcatcttaggtgtccatacggcgtgttttcccttttgggtccataaggacagatgttttccggtaaagcccggcttgtattcggcgacgcctttgatttcaggacaatcccccactaacctgttccagaccaggcgggtaaaaagttcttccgcatggggcgtgcagtcggggccgagcgcgcaggcatagagttcatagggattcaccctgttttcccggatattcagcacgcttttcgccgcgtgccaaatgagattgtgctcattgggcatcgcttgagccagttccttgagcaaggcgagttttctccggtcgctggcgtttttggccttgatatccagataacgctgccacgcaggataattgaagggattaaattgacgcgcttcccgcaagagcaactccacatgttcctgtttttgtgtgcagaaggacagataatacgttaaagccgattcttccgcatgaggatgatgaatgaatgaatcgtaagccatcaccagttgaacagggccttgccagggaatctgagcgccgccgctggcccaattccagccgccgagattgttgccgatttgccagtggccattggggtgtttccatacgaaagcgcagtgtcccggctgtccaatcgggtaagcgggaactcctttggaacgcaggaatccagccgcgcctttggagacggcgccgcatactcctccgtattccgtgtaaagtttcagcgtgatgggcttgtggtcgtaaaaagcgcttccggcatggacgctgacgcctttgtcattctttttacggtagggaatgaatccgggaaatctgcttccggctttctccggcctgatttttttccctgcgataaattgctgtgcccatgccagatcttcaaaaccttcttttccccggaatacgatggcccattcccagggttgcaaggtttctgcctgtggatagcatttggcgtggtgatgagaatcccggtagaagttaaatttggcgatgcattcttcaggagaaaagatgtttgcgacaaggccggctcccaatgccatgctgagttcaacgggattgaaattctgatcgctggtattccagatttggtaaaaaacggaaagagtacttttgccggctggaccagattgggcgagcatgttgaatactttcgggtggctggaaagccatttcctgaagacctgatccttgagttcctcctgagtgaaaggtttccctccttcggcagtattgaaaaactggtgcaggcagcacaatgccgccacttgaggggattgaatcagttttcgtattttgtcggaggtaagcgggccggaatcaagccggctgcgcaggacttcccggattttaccggcaatgaaggaggatcgccctgaagaaagcagtgtttgtatgtctgcttcatatgaagccagcgtgccaaagctctctatagacatgagcatgctgaagaggaaaagccagaggatgtttttcataaggtatgaaagacagacttaaatgcatggcaacataaattgaaaaaatgtcaataaaatatgatttttttgaatatgaaaaatacatttcatatttcgcttttatatcaaaatgatattgacggcaaaaggattttttcaaatggaaaattgggatcattggctctgagagacattggattttcggagccgaatccgggatgatttttgtgtctatccctcccgcaagatgatgaaaacggggttccattcggaaaaagaacggaaccccgtgctgaagcggtaaaacagagataatagttttcaggtcagatgatctctgccattgtcaaattcccaccacgccgccgatggtctggatgatgaccttggcgacgatagtcatcaggataagggccacggggtaggcggtggcgtagctgaccacgggggcctgggagtccgtcttgctggcgatggctcccagggccggggtggaggtcatgccgccgcagatgccgcccaggcattccagaatgttcatcttgaagaccttcatgcccacgaagtaaccggcgaacatgccggagcaggtgacgatgacgcccatgatgaagacggcagcgccgtgggtggctaccgtatccaccaggtccgctccgcccttgatgccggcgtcagccaggaagaagaccagccccagatcctgcaaaagaaggcgggtgggacgagggatgtagccgacgatggggcccagacgtccgaagtggccgagcagcagggcgacgataagggggcctcccgcaatgcccagggagatgcccgcgccgttgccgaggctgaagttgaccaggcccagaatgatgcccagggagaggccgaagcccagggagagcaggtccgtctggttcatgtcctggctgcggtggccgattttgtccccgtatttggtaaggttttccggagaaccgaccacagtcagcacgtcgttgcgttccagcgtggtttcccccgtggggacgaaggtgaagcctaggcgggaaatgcgggagataatgacgccgtccgtgcgcagggttttcaggtcgcggagcttgtgcccggcatagttcttgtttgtcagaatcagtttgcggcgctccttctgggagtccatggggtagggattgtcgcatacctcccccagaaaggcgatgtcgtgaggcatggtgtcgctattgcccacaatgaggacttccgttccttcccggaacgtgtcttccggcgtcaggggcatcagcctgtcgttgcgaaccacgcgggtgaccatgcagtgcagaccgtccagcagcttgcagtccgcaatgttctggcctatcaggttgggctgtgtgacgcggacaaggcgggaaatgatgctgacttcctgcctggaatgcatggctttggcctccttgttgaggtcaaagcgcagcaggcgcggcaggagctggacgaaaaggaccacgcccaccacgccgaacggataggcgatgccgtaaccgatgctgacgccgcttccggaggctcccggcaggctttccgtggcggccgccagcgccggggtgctggtgcatgcgccggcaaagatgccggaagagattcctgcgggaactttgaaccagatgccgaagaggcaggtgaataacgctgacactcctacaatcaccgcagacatgatggccagtttgctgccctgtttggcgatggcggagaagaagcggttgcccgcgctgaggcccacgcagtatacaaagagcgccagacccagctgccctacgccgtcgggaatggccaggcggtagtggccggcggccagcgccacgaaaagaacgccggaaaggcccaggttcagtccgtatattttaatgctgccgagagcgatgccgaaaaagatgattccgaagagaaccagggtgttgtgttggagcaggatatcaaacataaagacggttagcggttttgttcccttccttggcgcagagcaggggaatgcccgtcacggatgagaatgcgtgcgttgagaaagcggagggcgcggcatatttcttccggcgcgtcagtttctccgcaggtaatccagcagagtggcctgatccaggcaggacatataaggcgtatggtcgatgcccttttccataatgaacctggtcagcagtttgcgggcggtcgtaaggagaacggcgggatcccagggcttttccagatagttgtcaatgtgtgcgtcattgacggcctggatagtgtccgcgtgggtggcctggccggtcagcaggattttgcgcgtcccggcgaaacggtcgtctttggcgatgcctccaagcaactctactcctgaacctcccggcatgacgtggtcggagataaccagtcccgtcagttctccgtcctggtcgaattcttccaatagctcgcggcattcggatgcggattccaccccttccaggcggaagcaggaattcagcggacgaaggtcacgcaaaacgctgtccaggacttccggctggtcgtccacgcaaatgatgttaattttttccatgattgttgatggttggtatgactatcgtaaaaacggtatggcccggaacgctctccaggcggatgcggccgccgtagctgtccacaatgcgccggacgatggtgagccccagccccaggccgaaggaaagacctttctttttggtagtgaagttgggacggaaaattttttcatgcaggtcctttgggacgccggggccgttgtctgtgacggagaccagaatttcacgggtggtatgggatgtctggtccttgctgctgattttttccacccggcattctacgtggatggaagggttggtggtattttctattttcagcgcgtcgcaggcgttctgaagcaggttgatccaaatttgaacgagctccgtcatatctgcgaagatgccgggcacggagtctctgggaggcaggaccatttcaaaatcaacgccgcgcagactggacttgaccagagcaacagcttccgtaagggaatccgtcacgtttactccttcttcccgtctggtgttgcctccccccagcaggcgaacggaacggacaatggctgtagcgtgcctgacagccagtttcatatcgtgcaggtcgtgtcccaattcccaataagggagattttgttccagctggctgaggaatggcttgttcagcagctccggctgattctgtatatccggaatcagggccagggccttggccacgtcctgggaaagcccgtaatttttttcaaactggcgcgccagtctgcgctgttcggaagtggatgcggtggaagccccttccaaccctttgttgtacagggtgtagcggaaggcgttttcctggcggaacatgttgtccagggtttccagaacaaagtctgttttacgggacaggactcccagggaattgttgagttcatgagctattccggcggataattgccccagggtggcggccatttcagaacggtggagcatccgcagcgcttcttccttttccgcagtgcggtcaaagacgcgggtattgcgcgccgccagttcatggacaatggcgggaacaaactgttccaggagcgtgccgtagtgttccacgtccacggcaggggtggcggtgtcgatataggccagttccaaatcagtttccgcaatgagatcggaggagctgcggaaccatccggaaaagaaactctgcactcccaaatagtctccgggaccggcccggaacgccttgtagattttgtgggaagtggaagctgtttccgggtcttctttaacgacgtggcggtaggaaaccacgctgccggataaaatcaggtaaagccttttgttctgttccccctggcggacgacgctgtttcccctgctgatggcaataattcggtccggatcggagaagtacgccagattgatgcgttttagttttttctggaattcttcctgttcaatgatcatagggcgcttttcccgttgatgttggccatgccgggacaacatgtcccggcatggaacattaccttacttaaaaagcatggcattgggcaagaatcatcatcatgacgtaggtcaaaatcatgcccaggatacccagaatgacgccggaaatggccattcccttggagctgaccaagccggtggcataggccagggcgttgggggggtgctgatgggaaggctcatacccagggaggaggcgaaggccacggataccagcagggcggtaacgccgcccatgggagccaggttgtcacccatgttgacgccgacaacggcaataatcggaatgagcagggaggccgtagccgtatggctcatgaaggtggccatgaacaggcagatgattcccgtacccaccatgagtgggaagggggaccattcggcaaagggaatggagccgatcaggttttttgccagtccggtgtcttgcagggccagccccagggcaaagccgccggctaccagccagagcacgtcccagcccattttcttcaagtcttccttggtgatggtttccgtaatggcaaagacggcaatgggaatcatggcgatggtattggagtccagcccgtgtactcccttgcccgttacccacagcaggacggtaacggcaaaggtgacgtaaacgataatggccttgggggttttcaggaatttccctcccacctgcagttccagtttcttttgggagatggggaacagccacagcaggagaagccatgcaatcagaatcatgacgatgacgaaaggaatgccgaacatgagccatttgccgaaggagacgtccagccccataccctgcagcgccttcagcgcgattgcgttggggggcgtgccgataggcgttccaatgccgccgaggttggcggcgatggggatggccagggcaaaggcggcgcggcctttgtcttccggagtgaacagggccagcaccggcgtcaggatggcgagcatcatggcggccgtagccgtgttgctcataaacatggagaaaagagccgttacggacatcagccccagaagtacgaatttgggattggtgccgaagggttttaaaagtactttggccaggttcatgtccagcctgtatttggttgcggccgcagccaggaaaaagccgcccaggaaaagcatgatgatgggatccgcgaaggtggccatcgtggatttttgctgcatggtgttgacaaattgcagcccctggatgcgcgcggttatttccttgctgtacaggcgcccggccgcggtcttgagctgggcggctatggattcctgcccggcggcttcttccgtttttccttcacgggacagttcctgtgcgttcagatctattttttcataagcgtccatgagctggaaccccagggtcatcctcacttcttccgcgtccagcttggttttcttatttaaccggttttcgacattttccttcaatttgccgactacctccggattgatccctttgcctatggcgtcatccagaatggaggataccgtcgccttgtcatagcgctccggcatcaagaatgagagagagccgttggagacgcacagcagggacagggtaatgaccatcacggaggtggtccagatagggatgggttccaaaatccagaagagcgccgccatgacgaacatggcgatgacgcggatttcaatagggcttaattggattccccatgaagcgaaaggcaggaagaagacgactcctgcggcggccaggctgatagctgccttgagcagcttgttttgggtttcactcatgaataatagctggtaatatggttggcgggcggaagggtacttcccgattttacaaatagaaacttttatttaaaaaaattatgtcagaggggacggctgccgtttcccggagctggagccgggagctttctccgtgatgggaaaattgcgtaaccctatggggatatgcgtgtttagtaaggataagtcaatcatccgttcgggagcgccgatttggccgagtgtttcccctgtattaaaaaaattctgaaggtagtaggttcctctatagccgcgcgacgtcaaatccccgctgatctggttgatttccttttccccgagaaggccggagtggattgtcgtccgaacctcaaacgggaaatttctattgatcagataatccagcgtttgagtgaagcaggggaacaagtccggacgcccggtaatggagccgaacagtttttccggcgctttgtaatccagggcaatatagtcacaaagcccttcctccaccagcgtttttaccacgccgggccgggtgccgttggtgtctatttttactgcgaagccaagctgccgtatattgcggcagatagggataaggtcgggacacagcgtgcactcgcctccggacagaaccaccccatccagaaatcccacccgatctctgagaaaatcaagatagtccgcccggtctccggcaggagaatccgttcccctgaccagggagacgttgtaacagtactgacaaaacaaattacagcctctcagccagaagatgcaggccaccttatttggaaaatccagcaaggtgagcggcgtgatgtctgctatgccccgacccgttcccatcgacttcgcatatgttgttgggagaattatcgcggctgttccgtttgggcggagcaggagcaggggcggcccggttccacgaagtggacgcggtcatggaactcgccctgtttgccggcgttgaaagtttctacagggcggtgatagcccatgacgcgcgtgtaaacggtgcagcgggtccggtcctgtgcgtatttgcttaatatttcctgtttggtcattgtcgtattaatggttgggtttgaagttgggcgcctattggaaaagggattttattcatgcctgtggatgtggagcagctcctcatcgcagaaggggcagtattcgtgctccccgcgcagataaccgtgcttctcgcaaacggagaaaagcggagtgacggtgaggtacggcatgcggaagcgggtcagcactttgcggacaatgtcccggcaggcttccggggagctgatggcttcgttcatgtacatgtggaagacggttcctcccgtgtagcagcattgaagttcatcctggagctggagcgcccggaacaggtcgcttgtgtggtccacgggaagctgggagctgttcgtgtaataacgctgccccacggggccggcctggatgatatcaggatagcgtttctggtcttcgcgggcgaagcggtgcgtggtgccttccgcgggcgtggcttccaggttgtacaggttgccggtttcctcctggtactcctgcatgcgcaagcggatgaattccaggatctcttcagcaaaggccctgccttcttcagaggtaatgtccatcgtatcgttggagaaattgcgcaacagctcgttcatgccgttgacgccgatggtggagaaatggttgcggaaggtgggcaggtagcgtttggtgtaggggtacaggccgcggtcatacatttcctgaacgaaggcccttttcttttccaggcaggatttggccagatccagcagttctcccagcctggcgaacagggcttcccggttttgcttgaacaggtagcccagccgggccaggttgatggtcaccacgccgatggagccggtcatttccgcggaaccgaaaaggccgccgccgcgtttgagcagttcccgcaggtccagctggaggcggcagcacatggaacgcacggcgtccggcttgtaagcccgttcgtcaggcacgcgttccccttgctcattgacggtgtactggctgccgatgaagttctggaagtaggaggaaccgattttggcggcgttttcaaacaggagaggcacgttttccccttcccagtcaaagtcttccgtgatgttgacggtggggatggggaaggtaaagggctgtccggtgctgtccccttccgtgagaacttcgtaaaaggccttgttgatcaggttcatttccttctggaaatgcttgtaggtcagctccgtcagcttgtttgccccgcgttccctcgccagggcgagcaggttcgcgtcttctattccttcaaagaggtgttcccctccgctgaagggggcctggtccctcaggtcgcgcggtacagtccagtcgatcgtgacattggtaaagggagactgtccccagcgcgagggtacgttcaggttgtaaacgaaactgcggatgtctttcttgatgcgggggaagtccgtctggtccttgaaaacgtagggtgccaggaaggtgtcaaaggagctgaaagcctgggctccggcccattcgctttgcaggatgcccagaaagttcgccatctggcccagggcttcccggaagtggcggggcggcctgctgttcacgcggctgcgcacgccgttgaatccttcattgagcaggttgcggaggctccatccggcgcagtatccggtcaggcaatccaggtcatggatgtggtaatccccttcccggtgcgcggctccttcccgtgcggagtaaacctggtccagccaatagttggcgattaccttgcccgccgtgttgttgatgagccccgcattggaatacgtggtattggagttggcggcaatgcgccagtcgctttgcccgatatattcctctaccgtctgcttgcagtccacgtaggtattgccggaataaaggccgccaagctgttcgcgctgcatcttgtgcaggaaacggtaggtgatgaaggccttggccgtgtcaaaatatccggagcggaacagggcgcgttcaatcatgtcctggatttcttccacatgcgcgctgtcctgatggctcagcttggcttccacctcttcatagatggaacggttgtaggcggtcccggaactgtggaaggcttttctaatggcctcttcaatcttatagccctggtattgttcctttttcccggaacgtttgatgatgcttgttgccatggtgggtgtctcgcttggaaagggtggtgaccgctcatccgcgagcctgggcaaaagcctggaaagaccataggcaggggccgaccgcatgcgcgcattcccggaaaggggtggcatgccgaagacctgtgcgtatgttcatcctgtccgcgggatgggaatacggcagcatcaggtcgtcttctggcttccggtgcgacatgtgatggggacttcccggctgcctgggcagccagtgtccggtccatcgtctaccggttacagcggcgcgtccgcgacggattttcaccgtcttccgttacctgcgctggaacgcaatgaaccacagaaagagacctcccgcaagaaaaatgtataaataatgtgttaaataattatttgtatactatatatagtatctgaagatagaaaaatgattgataacacagttttcttttccgtcatggcaccatatatgcccttgcgccctttttctggcctggaggagagcggaaaaagaagaattcttttttacagggaaattccaacccttttttccgtatgatataatatgcgtttctttgcccgttcaaaaaatagatggaagaaatattttctgttgccggttcttgctgtgttttccgcaggaactcctgtttccggagcttctgcggactggaatgaaaagaccatccgggacaaccttcagctggtggcggaatggcaggcgaagcatcctaaaagacgttctccgctgcattggacttacggagccttttattccggcctggcgcagtatggcctgtccgttccggaaggtccggggctgccgttgctgagaaaagcgggagaagagtaggaatggaagaccctgaatcggcattatcatgcggacgaccatgccgtggggcatgcctagatggagatggcgatggaagacggcaatcccgccgcagctgaaaagattcgcgccgtgctggacaaggtgatgaaccggccttcctccgcttccctccaattcctgactccgggctgccaggaccgctggagctggtcggacgccctgtttatgtcccctcccgtgttcgtgaaactggcggcctataccggagaccgccgttatctggagtttatggatagggaatacaagcttacctgcgactatctttttgaccgggaggagggcctgtttttccgggattcccgctattttaccgttccggcggcaaatgggaaaaagatgttctggagccggggcaacggctgggtgattgccggattgcctcttattttgcaggacatgcctgcggattggccttcccgccccttttatgaagacttgcttaaacgtctggcggcagccctgaaaaaatgccagtcgtccgacggttcctggcatgcgagcctgctggatccggacgaacctcccttgaaagagatgagcggcaccctttttatcatgtacgggatgctgtggggagtgaaccagggatatctggatgcggatgaataccttccctccatccgtaaggcctggaaggccgcctgtgatgcggtcagcaaggagggcgcgctgggatgggtacagcctattgcggacaagccgggccattattccgggaaagatacggaggtgtacggcgcaggggcctacctgatggccgggagtgagttgcgtaaatatgtcattgaccgggatcatccgcagaagaagaccgtgaccgttacgaatcccctgggcaggttccgccctgctgagaccgtgtcggttccatggccgtccggaggttccggtgatgccgccggccttcgcgtttttgacgtccgtcacggacgtgttatcccgcatcagctggcggatacggatggtgacggaacaacggatacccttttgttccagagcaatttccggcccggaacggttcgtgatttctggattctggagaattcctgcctgggcgaagcgccttccgcggatgtctgtttcagccgtccggtaccggagcggctggatgatttcgcatgggaaaatgatcttacggcgcaccggatttacggtccggccgtcgccaggcctgcccctgagggagagggcctggtttccagtgggacggatgtatggagcaagcgcgcaggcgctcccgttatcaatgaattttacaaacggggggattaccaccgggatcacggtcggggactggatatgtacaatgtaggtccggggcggggctgcggcggcattgccgtgttcagggatggaaaaccgcatgtgtccggaaactgggccagcgcccggacattgtacaatggcccggtccagaccgcttttgaggtggtttatgcaccgtgggacattggcggcggcgtgcgtgtggcggagacgcggagggtgacgctggatgcgggaaaccgtttctccaaagtccgcagcgtcttgaacgtccggggggctgaaacggtgaaggccggtgtgggaatggataccggaaagcgcagaaatgattatgaagcagttatggaggaccgggagtccggcggcctgatgaccgcatggagcaggccccggaaggatgacggatgcctgggaaccgccgtaatcgtgccctgggttccggaaggccgtgcggtggatgcggaaggctgtacctacttgctcaggaaggtcgcgaacggagaaccctttgaatggtacatgggggcggtttgggacaaggcttctcccattcggtccgctgccggctgggaagcggaggctcgccgtgtccgggagtgcatcggccatcctctgcaagtccgggtgcggtaggagccgccgcatcctgttgtttctcgcggagcgcgtggaggcttcctcttgttacggctgcggcggtgcgggaatgggcagccattccgccagcgtttccggctggaggggggccggagtttcccgcgcgtccggagaagccagattcaggtcgttcctgacgatttccgaccggatggaagccagggaaagaagggtatggaagatgtggtcgtgggagacggctttcagccggttggctttcagggcgcgcaccatgtccggatagcgtgaggcgaaagcgtccgaataccagatgaacatggcaggccggtaaacaggcggcaggatatggccctggaacatttttccttcctctcccagcgctacgccgtggtcggagcagtaaaaataaatggcgggcctgttcttcaacagtgcaatcatgcggtgaatggaggcatccaggtcgacgatggaattgtcataggcattgacggtttcttccagacgggccttggggtcgtccatattgcaggatgccggggtaaaacgttccgcctgcgcgggatagctgaacgccatatggctcccgttattgtaaatgatataaagctgcctgttgcggccgaagtttttcagggattcctccatgaccagggaagttcgttcctgcatcattccgggcgtctggtgctggagcggcgtctgtctccgttcacggcagttccgtgtcaggatgcccagggaataatcatgaatggaatctccgctcaggtccatgatacggacggtgcggaatccgtgtttgttgaacaggtcaatgaaggaggagtgaccgggagtgcggcggtacagttccgcatccgtaaacatgccgatggcggaaattctggtcacgatgccgaaggaagtggcatgggggaaggaaacgacgttgggctctctggaaagccggggcattgtgttccgatggtaaccgttcaggggaagatggtccccccggacactctcccccatgtggaaaaccacggccaggtcgtctggggcttcgcactgggaaaggggctccgcgcaggacggaaggttccgcaatgtgttgaaacgccccgcatcctgggtgatgtattcgtccgccagtttgcacgtcattgcaatatccacgagaggccagccttttgccttgtcagacgtgtagtaaagataaaggggttccgagctgtaggaggctgccggaatgctcagcagcagaagggccgcgtacaggccccaaatgcatgccagtgcgccccacgtggctttttggcgcagggaacggcggctccagtagatggccaggtagataaacccggccagaagcagggttcctgcaatggaagcgggggtgcagaaggcgcaggcttcctggaaattggtctccgccatgctggaaagcacggaaaggttcaggaccaatccgtaccgcatctgcatcatgtacaggcccgcattgaacagaatgatggcgggaagaaggacataggcggtgaagcggtatttcaggcagagaagaatggtgccgcagagcagggatgcggagcaggcgatgcccatgctgctcatcagcaggctttggccatcgttgagcacatagggattggccgccagcgccgccgcaagcccggctgcccacaggcagcgcatgcggcggggaatgaacgcggcgcgcagagcctggcagacagcggccgacaggccgtatgcggacggataccgttctgcggaaccggcggatgcatggggagggatcatcgcaaaggagggataaagaatgcttcctgcttaaagcgaagaaaaattataagagttttaaaatgaatcgcaagcagaatgttggagaagctttttccgatgtgggccgcctccgtaaaaagggaagggttttcttccatggactgctgcggcaaaaacagaaaaccgcccggaatgttccgggcggttcctgggtgccgaggacggcctccggtgctcaaacggaatttatccgatgacgaggaatttttcagccttggtgccgcagagggggcacgcatccacgccttccagagatttgaacgtgtctccgcaaaccaggcatatccagtattgcctgggcagggaactggtatctccgctttccagggccttcagggcgacggaataaaaatcggcatgttctttttccgcttccgtggcccacgtgaaggaacggacggcggctttctgcccttcttcttccgccacagcgatgaattccggatacatgctttcaaattcatgggtttccccggcaatggcggctttcaggttttcggcggtggttcctacatggatctggatatcgatgggctccattgttgctcccagcttttccagaaccttgttgtggttggcggcgtggacggattccgccttggaggcggcttcaaacaatttctgaataaggggctgcccttcctgggcggctttggcggcataggccgcgtaagtggcggaggcggtgctttcgcccgtaatggcagctttcaggttttctatggtcttagtcatcggaaataaatttataataattctaaaaagatgcaactgaaaaaatccttcaagggaggaaaaaacgcaaattcctctttctgcggcatcacggggagccgttacacaatgattcattgacgcgtgcatggcgagcctgtacaacggaaacgttatgaagagcattgtaacaattagttcggcatgtgccctggcatttgcaggtatggcttccgcccaggatgccccggctccggcacccgccgctgaaactcctgccgcgcccgttgcgccggccgctgaagtttccaaggaagcgaaggaagccgctgatcagatgctggcgttgatgaaggaaatgtccgccacgctcagcacggtgaaggacaaggccactgcagacgcggctgcggaaaagatggcaaaaatcaatgaaaagggggaagccctttccaagagcgcccagaaggttcaggctgaaatggatgccgccatgcaggcacgccaggccgagcttctgcccattttcatgggcatgatgactgacatgcagcgtttgcagcaggccgacttttacggaagccaggccctgaaggacgccatgaagcagactggcgctgccggtccggaagaagatgtggaagtggaggaagatgtggaggtagaagcagttccggcccccgctcccgcccagaaggaagcgtccgcccccgccgccaagtaactttctttttcaggattgtctctcctccggcattgcgagatgccggaggatttttttatggaagggccatctgaaaaagcctccgggggggtgacgcaggaacctgcggtatgcctggccgaatgggagaggacggtgtccggagtttgccggaacatttgaaggaggctgaaaacaggcaggccgcctccgtttccggtgcggcctgccgggtagtgatgaatgaatggccagacctgttatttggcctttttcttcttggcagcggctttggcgggcttggctgccgtttttgcggccttggcgggtttttccgccgggcattcgttgacggagttccaggaccagtcccatttgtccacgttcatggcgcaggcggtcagaagcgctacggaagcgtccaggtcgtctttgtgagccatttcaataacctggtgcacattgcgggtgggaacggaaatggccccggcaatggaaccgcccggaacgaatttctgcatggctccggcatccgtgcctcccgccggcagcatttccgtctgccatttaattttgttggcgtctgccatggccttcatgaacttgaccatgcggcggtctgcaatgacggaaccgtcatacagcttgatggcggcgcctgcgcccaggtgggaaacctggtcgtgcgccggagttccgggaatgtcacaggcgatggtgacgtccagggcaatggagaaatccggttggatgtccagcgtgccggcctgcgcgcccctcaggcccacttcctcctgaacggtaaaggcggccacgaagttgcaggagggtttcttcctggaagccttgatggcgcggagggcttcaatcagcacgtagcacccggcgcggttgtccagagatttgacgttcacgcaatcccccatttccaccaaatcccgttcgcgggtaacggagtcgcccacggaaacgtatttttccacttcctctttgctcatgcccaggtcaatgaagaaatcggtcacttccggcagcttggtgcgttccgccggagacatgacgtggatgggtttcacgcccatgacgccgatgaggtcttttttgccgtggacgatgacgcgctgagccgtcagcgtcttggcgtcaaagccgcccagaggcaggaatttgatgaaccccttgtcgtcgatgtggcgaaccatgaacccgatttcatccatgtgggcggcggccatcatggtcttttccgtgtttttgccttctacgatggcaatcacgctgcccatgttgtccacgcgcacggcgtccaccagcggggccacttcctgaatgatgaaatcacggattttgtcttcaaaccccggagcgcccggagtcacgcaaacctgacgaagcagttccaaattcataatgccgccaatgtaatggttttcatgaaggttggctagcccataatgcggcctccggaaggggagcccgcaggaacccgtttgccgtgcttaacggcgttcccgggtaatgacggcctccggttgtgcgggggctccgttgtccggccttttgtagttgacgttatgggcgtccagaaagggaagctggcggtcgaggcgcttgcggaagtccttctcgtttttctgatctttgggggtccaggctacttcagcgagcgccagggcgcgggggaagacatgatattcccatttcggcaggttagggatgtactccgtccagatgttcgcctggcagcccagaacctgtttttcccgttcccggggcgttccctgcgggacggggtccagcccataaacgcgctgccaggtcaggttgtcgttattgatggtttcatactccggtactgaaggtttgccgggcccctggtcatagtcaaagtacaagtggctgttgggcgtcatcaccacgtcgttgccctgttccagagcgtgccgcgcgctgttcggcatccagctgcgccagaccatcatggtggcggtgggggagaggcctccttcctggatttcatcccagccgatgagcctttttccgcggctgttgatcattttttccacgcggcggatgaagtagctctggagttcgtgctcgttggccaggccgttgtccctcatgacctgctgcgccgcgggggactgcttccactggtccttgggggcttcatccccgccgatgtggatataggggctgtccgggaacagggcgcacacttcgtcaatgacgtcttccagaaaacggaaggttttttccgtgggagcgaaggtgtagggatgcacgccccaggtttcctgcaccttgggcgcatagcccggaatgtccgtgttgcccagttccggatacgcggcaatggcggcggaggcgtggcccggcatttccacctccggaatgacggtaatgccgcggtctttggcgtatcgcaccacttcccggatttcttccggagtgtaatggccggagtagggcgcgccgtccgccttgttgcggctgccgatgacgggggactgcgcccgggcgcctcccacggtggtcagcctggggtacttggagaccgggagcctccatccctggtcgtccgtcaggtgccagtgcagggtgttgaatttgtacctttccatcaaatccagaatctttttgatgtcccgcacgggcatcatgtggcggcagctgtccatcatcaggccgcgccatgagaagcggggccggtcctccacgtccagcctgggcagggccggatctccattcctgtcggcagcgacgctttgtacaagggattgaagggcatacaaagcgccattcacggaaccggaggcaatggagatggaatccggcgttacggcaaggcggtagccttccctgcccagggacgcgtcttccgtaaagatgatgtccgctttgtttttaaccagcaccgtattgattccattatcgcggaaaatccgttccgcctgcctggaaagcggattttcttccgggagcctgacgccgtttttcagggaaaagccgctttctccggtttgggcgcgcagggcggcgggccggggaatcatatggggcgtttcgagaaccggagcggacggggcgccccagcaaacagaaaacaggctgacaaccgtggcaggaaaaatacacttggaaatcatagcgtacgtaaatacgcggcattttccggaaaaattccgtttcggggttatttttgcaaatgcagagaaaaccggcatatgaaaatagcggttgttccgcccgggcgcctgtgagagtattcccgcgctatgaatgaagccgcttccccccgcatcaggaagacgatggtatttgtgctgctggcgctttttctgggccagttcggaagcggtgtgtatgatctcattttcagcaatttcctgcgtgatgcccagcatcttgacgtggagatgcgcgggctgattgaattcccccgggaattgcccggcatcctgtctctttttgtggtcagcctgcttttcatgtttaatgaggtccgcatggccggggtggcgtgcctgctgatgttcggcggcatgtacgcgctggctttctgcggcgccggaaccagcctgtggactttgtctgcgtggattttgacggtgagcctgggtcagcatatcctgatgggcatgattgacaccattgtcatccatacggcgaggccggaaaaccgcagcctgcggctcggccagatgaaggctctgggaacggccgccgcgctgctgggcgcgctgtgcgtgtggatcaagtggaaattcaatcaatcttttgccgtggactttttcgtcacggggggcgtgtgcctgttggcgtccctgtttctgagccgggtgaagacgcccgtcttcccgcagcggcgcggatggaggcaatgtttcgtcttcaagcgcagatatgccgtttattatggattggaaattctgcacggcatccgcaagcagctttatctgaccttcggtttctggctgatggtcagcacgctgggccagtctcccggatatatcggaaaaaccctgctcatggccggcatcatcgggctggttactcaacccctgatcggctggagcatcaagcgctacggggaacggaaggtgacgattttcgacagcgtggcgctgtccctcctgtgcctggcatacgccttcgctccggaactgctgcccctgcattgggccgtgggggtagtgaccgcctgctttgtcctggacaacctgctgtttgcgctaggcatggcccggagcacctacgtggcccgcatctgcgagaagccggaggacattacgccaagcatttacaccgggctggccatcaatcatgtggcttctatcgcttacggcgtgctgggcggcgtgatctggatgaatacgggcggcccgcaagcggtgttcctgataggcggtgcggctaccgtcggggccgggctggtggcgcggcgcatggacaggccgcagccttgaccgggcgcctaacgcacgggtttgtccgcaccttttttaagggcgttcataatcttgttgaagatatccgtattttcataaatgccggtgaagtcgccgcttcccgcgccgaaggcatacaccggaacagccacgccgtcatgactgccggaaccgaaccgggccgttatttcccccttttcccggctgccgcccgtgagcgcgaatgcccccgtattatggtccgccgtgatgacgaccagggtgccggggtgtttggaggcccagtcaagcacggctcccgcagtccggtcaaaatcaaggagttcttccatcatttcttccaggttgctgctgtgggctgccttgtcgatgttggacccttcaatcatcaggaaaaatccgtcgggattccgggaaagggtgtccagggctttcagtgcggcttggcggaaaacgtctccccgcttggagggcgggggaagattccccggagcggcgacaaccagcgtttttccgggaggcaaggcgccggcttcttcccaagtgcgggcgacgcggtatccctgcgcctgcatttcctggaagatatccctgccgtccggcctctgcgtgaagtatttgccgccgccgccaaagatgaaatcggcacgggaacgggggtaatccccaatgatgccgtaggcatccgatcttttttcattattggcgcagaaagatgccggggtggcgtcattcagctcgcaggtggcgataacgccggtggatttgcccatgtccgccgccttgtccaccagggaatccagcctgttgcccttggggcatacggcgactcgatgataaagcgtcttggttcccgtcgccatggcggtgcccgcagcggcggagtccgtgaccagcttgtccgcgcaccatgttttggaaatgcccgtaaccgggcagttttcaataaataagcgtcctctgttggctgcccatgcggcggaaaggtggtggatgcccatgccgtctccaatcatcaggattacgttggtgacgggaaggctgcggtcaggttccgggatttccgccaccggataggggcgttccagaatgaagcgctggttttccgccgccggaagcagggacggagcaagaaggagggcaaatgctaaaaggcgcagcggagaagtcatgcaatcactttcccgtctgcggcggaacaagtaaagaggaaaaaatatgccggtcccgtatggaaccggcatgaaccgttcaaaagggcttatttggcgtccgcctgtttttgcaggatgtcccggatctgttccaggaggacgacgtcatccggcttgggagcaggggcggccggagcttcttcgctcttgcgcctcagggctccgatcagcttgatggctacaaagacggagaaggcgatgatgaggaagtcaatggtcgcctgaagcaattccccgtattttaattccacatcgcccagcttcagcaccaggtatgccaggttgaccccggaagtaaggtagccgatgatgggggtgatgatgctggaaacgaagacggagacgattttgttgaatgcgccgccgatgacgacggccaccgccaggtcaataacgttccctttaagggcgaatgccttgaattcttccagaaagcctttgaggttgaaaaaatgagccatagtggattattgctggttgcggcggttattctgccgttaaaatgataaaagaaaagaaaaatgaatgggcggcggacaaagatgtgactgtcttccggggtaaaatgcggcaatcatgacgtggttcccaaaaaaatcatttacagacggggccagaagagcaaactacgcccatattaccttaacttatgaacacagaagaaaagctcaaccagtacgtactccattcctatggccgttatcccatggctgccgtccgcggagaaggctcccgactgtgggacagcacgggaaagtgctatctggacttctgtgccggcattgcgacctgcgtgctcgggcactgccatcctgcggtgacgcaggccctgcaaaagcaggccgccaccctggtgcactgctccaacctgtaccagatcccccagcaggcggatctggcggaattcatcgtgaccaaatgcgtggagcgcccgggaaaagtctttttcgccaacagcggtgcggagtccaatgacggtttaatcaaagtagcgcgccgttacgggcaccgcaagccccagccggacggcaagccccgttatgaggtgcttacgttcaacaaatccttccacgggaggacgctgggcagcatgtccgccacggggcaggataaaatcaaaatcggctttgaccccatgctgccgggattccgccatttgcctttcaacgatctggaaacggcccgcgaagccatcaggccggaaacggtggccttcatgctggaaaccgtccagggagaaggaggggtcaactgcgtgactccggaatttctgcggggcctggcgcagttgtgcagggagcatgatcttcttctgctgatggatgaagtgcagtgcggctttggccgttgcggcgacatcatgggatggcgcgccgtagctccggatgtggaaccggacggcatttcctgggccaaggctctgggcggcggtttccccatcggcggcttctggatttccgaccgcgccattgacggccagggtacggagctttcctccatcatggatcccggctcccatggctccacgtatggaggcaacccgctcggcactgcggtaggcctggccgtgctgcgggaagttgtttcccaggggctcccggagcgggcgcggcgcctgggcgcggaaattcgcagggaaatagaatcctggaacctgcctgttgttcagggcgtgcgtggcctgggcctgttgctgggcattggcctgaacccggaaatggtagccgcgccggagggcaagacgatcgcctccgtagtggtggaggccctgcggcaggaagggttgctttccgttcccgccgggccggaaaccgtccgtctgctgccgccgctgaatgtcagtgaagaggaaatccagcaggctctggccatcatcaggcgcgtgcttaaaacgtacgccaaatagaatacagcccttatttgctttattgttatgaaggaagaagccattaaagcccccggcagcacgataaagcaatattccatcatgctccagaaccgggtgggggccctgaccgccctcctcggcctgctggacatgcacggcattttctgtctgggattcagcatgcaggactgccatgaggcgactattgcgcgcctgattgtcagcgatccggaaaggacgtcggaaatttttctggagaaaggtatttgctatacggagtccggggtgctggtggcggtgctccgccatggccccgcagacctcaaaaaatgcctggatgcgctgtatgtcgcggaaatgaacgtcaactttctctatcccctgctgccttgcgtggggcgggggtctctggtggctcttcacgtggaggatctcaacttcgggcgcaccgtgctgaattccagcggcatcaaagtcctgttccagcaggacctcagccggtaggaacagccgtttttcctttcttccccgctgccctgttcaggagcgttttctccaagcgcctcaaggggttgcccggctttttcgccttgacgggaggggaaaacatggtatggtacgggccgcatggcaaaagtacccgtaatcaatcttcgcaagggacacgcggtcaattacaacaatgacgtttgcgttgtagtcagcatggagcacaagtgccccccccgcatggcttcctatgtgcaaatgagcatccgcagcatttccactaaaaaggtgtataaccttcgcctgacttccaatgaatccctggaaggcgtcaacctcgcccgtgaggaatatgagttcagctacattgacggcatgggttatcacttcatgaatccggatacatacgaagacatcaccgtgtctccggaaatcgtggaacccgtcaaggattatctgatggaaggcaatatctacatcctgcttttcacggatgaaacggtcgtttccgtagaactccccgccgccatcaccatggaagtggcggaagctcctgaaggcgtcaagggcgacagcgcgaacaatgtttacaaatccgccacgatgaccaccggactggtggtgcaggtgccccttttcatcaagcccggtgaaaagatttccgtaaagacggaagacggttcctatctgggccgcgtaaactgagttgcccctctttctgttctttgaagagccccgtccggtttgtccggatggggcttttttcatgccgcaatgcctgacctttttcctgtttccggaagaggacggttaacttttccgcgcggtatggaatggttcctttatggggggaatcctttttctggtaaatgcgaacgtagtctatttcatatttctggggcagcggcagtttgtccagatctccgccggtggcgcccagagccaggttcaggatgatgaagtgaggctgccggaagggattggcgacttccttgtaagaggcgttgacggtattatccaggggagtccggttcagcagaatatcgtccgcatacaggcgcacttccttttcatcccagtccatacggaagacatggaagctgtccgcccagtccgcgtgtttttcctggagccatttgagcggcgtgtaagtggtactccatttggccacgtcctttttgggggagccccagcagagattggccagataggtggactggtagtactccatgatgtctatttccccgcacatgggccacttttccttgacgcccaaggtccagaaagcaggccacatgccttcccgcgggctgaatctggcccggatttcaaaccgcccgtacagccaggaaaatttgccgcgcgtcgtcagggaggcagaggtgtattccgcctctttccgtgtcgtctgccagttttttccctccggatcgtaatgggggttggcatgtttttccttcctgccttcaataatcagcatgccgtctttgcaataggcattttccggctggtaccattgcgcttccttgttgcggacgaaaccgtgttcgtaattccatttggcagggtccggacggccgtctttgtcgaattcgtcgtgccagacgagttcataatcggaataatccgctttttccacgactctctccgtttttttgacgccgtcaccatggagggtgtaaagctgggcgtggaggggggtggacaacaaggccgcactggccaggatgttgaatagaggaggaatgttcatggaagaaagtaaaggtgtttgttactggtacggggccgcgggcgtttttttgtcattttttatcagagggggctgaagccgcgaaagcggcttgaggaacggaataaatgtgttaggttcggctaacagtatggggtcttgtctggacccggaacatcaaacattccgttttaatgacaatggaagaaaagaactatcttgtttccggtatgcattgcgccgggtgtgccgccaaggtggagcgcgccgtggaaggattggagggggtggagcgcgtagagctgaatttgctgacggggaagatgaccgtcttgtttgaaaagcctgattcccccgccatggagcggatagctccggtggtggagaaagtcggtttccgcctggcggactggaaggaggagccgcttgccggaacggagagggaggaaaggctggaacaggaggaaacgggcggctcccgcctcgtttggtccattctgctgctggttcctttgatgtatttgtccatgggccccatgtggcactggcccgttccgggagggagttggggcctgtggatgaattggtggacacaaggcattctggcgggcgccgtcctgtggctgaaccggcattatttgataaacggcgtgcggcagcttgtggcgctgtctcccaatatggattccctgatcgccatcggttccggctccgcttttctgtatgggctgtatttgctggttgcggggatgtggcagggtttcagtgtggagggaatggagctgtattttgaatctgcggccatgatcgtcaccctgatttccctggggaaataccttgaacgccgctcttatcggaaaacgaatgccgccgtaaaagggctggtgaagctggtcccccaggaggcgctggtatggcatgacggcgcggagcgcgccgttccactggatgaaattcgttccggggacctggtggtggtgaaaaccgggcagcggattccggtggacggcatgattgaagaggggcaggcggctctggatgaatcagacctgacgggggaaagcatgccggtggacagggcggcgggggaccgggtgatcagcggaacgttcaaccgggccgggtatctcaaaatccgcgcggaacgcgtgggcggggattccacgctggcccgcatgatccgcctggtggaacaggccagccagtccaaggcgcccattgcgcggctggcggaccgggtatgctatttctttgtccctgcggtcattgccgttgccctggtatcgctggttgggtggatggctgccggggagggtttttccttcgccctcgccagggcaattgcggtgctggtgatttcctgcccctgtgtcctggggctcgctacgcctatcgccattatggtggggacgggcaggggcgcgcggctgggcatcctgtgcaagtccgccggagctctggaagccctgagccgcgtggataccgtcgtttttgacaagacgggtaccctgacggaaggggagccgcgggtagtggccgtgctgccggaggaaggcatggatgcggacgcgctggtggaaatggcggcggctttggaacagggttcggaacatcctgtgggaaaggctgtttatgaacacgccaggcttctgaatttgcctgtccgcgccgtggcggatttatccgtagttcctggccgcggcattgccggaacggtggatggggtgccttatgcggtgggcaattccggattcatgcaggataagggaatttcctggaaggaggatgaaagccgcctgcgggagttcatgcggcagggcgcgtccccgctgtatgtgggcaggggcggatgccctgccggcgtcatcatggtggcggattccctgaaaccggacagccgtgcggcggtggacagtttgaagcggatgaacctgcgcgtcgtcatgctgacgggggacaacgccgccacggcgcggcacatggccggagaactccacattgacgaggtggtctccgacgtgctcccggatgaaaaggcctcccatgtgatgaagatggaggaacgcggggacaaggtggcgatggtaggggacggcgtgaacgacgccccggctctggcctgcgcccgggtgggcatttccatgaagtccggaacggagctggcgatggaatcctccgacatcgtgctgatgaaaagcaaccccgcaggcgtggcggaagctgtccagctgggccgcaccacgctgctcatcatcaggcagaatcttttctgggctttcttttacaacatcatcggcattccgttggccgccgggtgtttatatcccgccttcggccttacgctgaatcccatgattgccgccggggcgatgagtttgagttccctgtgcgtcgtattcaattccctgaggctgcggggtttcaccccacgcctagggcgcctggggaaatagggcggcctctcccccaccggcgtttcccgttcaggagggctgcagcagggcctgggccagcgtgcgtgcgtggtctccgccgccgcccagcatgcggaccagttcatccacccgttcttcatggctcacctcccgcaggcaggagatggtgcggttgcccgcggatgctttctgaaccaggtaatgatgggaggccagggccgccacctgcgggaagtgcgtgatggagatcacctggtgcctgtttccgagctgctgcatcttgaatcccacagcccgcgccacttctccgcccacgttggcgtctatttcgtcaaataccagcaggggggtggcatccttgtgggccagggcgcttttaatcgccagcatgatgcgcgccagttccccgctggaggcaatcagacggagaggcttggagggttctccgggattggggccaaacaggaattccaccgtttccattccctgtgaacccggttcctgaaggggggagaggctcacttcaaagacggcctggcggaatcccagctcccgggagtgcctgacaatggaagccgccagcctgggcgcggagtcctggcgcgctctggtcagagcctgcccggcggcgtccatctgcttgcgcaggacggcgatggaggccctcagctcttccaggcgttctgtgcggtgttcaatgcggtccaggcggctggccgcctcctccctccgggagcagacgtcctcaaaggaggggccgtatttcattttcagagattccagcaggttgatgcgttcctccagctggaaaagttcccgggggtcgcagtccagttcggcggaataatccgccaggcgtccctcaatttccttgagttccaaattcactcccgccaatggagccagccacgcggcggtggaggcgtccatgcgttccagctcatgggccgcccgtgtcaattccctcaattgggtccccaggccgggcacatccgtttcctccagcatggaaagcattttggagacctgttcccggagccgggtgccgttgcgggcgcgttgccagcgttcttccagcgtgagcacttcttccggagtgaaggcggcggaatctatttcatccacctggtggcgcagcagttctatttcccgtgcggtggccgcttccgcatgttccaggtcatcataggcccggcgcgcatcctgccattgcctccaggcgtccgaataggcgtgcaccaggggagcgtgctccccgaaggcgtccagcagggaaagctgcctttcctgggagaccagggagcggtagtcgctggggccgtgcatgtccaccaggcaggctcccgcttccctcagcagattcagggtgcacgggctgtcgttcaggaactggcggttggccgtggaagagatgaggcgcttgataatcaggttgccgtcttcgcagggcgggacgccatgctcgttcagaatggcgtgcacgggggaggattccggcagatggaacacagcttccacgctgcattgctgttccccggagcggatgagcgtcttgtccgcccgttctcccagcgccaggcgtatggctccaataatgacggatttccccgccccggtttcccccgtgatgcagatgaatccggaactgggttcccagagcagctggtccacaagggccaggtttttaattttcagcaatgtaagcattcgggctttggattttgaatgcattatggcatcatttgccttaaacgcaatcatgacctctgtgatgaacattctctttttgggcacaggaacgtccaccggagtgccgcagataggctgctcctgcgcggtctgcacgtccccggaccccagaaacaggcggttgcgttcttcaatttatgtggaggccgctggcacccgcctcctgctggattcttccccggatttgcggcagcaggccctgcgggaaaatatcacggatgtggatgccgttctttatacgcatgcccatgtggaccacgtgggaggttttgacgatttgcgcgccttctgctggcgccggtccggcggcctgcccatgtatgcttctcccatgacggtggacgccctgcggaccatgtacggctgggcgttcgttcctaaaccggggcggagcgggtacgtcaggccggagcctcacgaggtgacggctccgttccgtgtggggaacgtgctggcgacgccccttccggtgctccatgccggggtggagacatatgcctatctcttggaagcggaaggccggagcctggtttacatgccggatgtgaaaagcatcccggccccgtccttggagaggatgaaaggagtggatttgctgattattgacggactgcgttatcatctgcaccccacgcacatgtgcctggaggaaacgttggccgccattgccgccgtccggccccgccgcgccgtgctgacccacctgtcccatgatatggattacgggattctttccggcaagctgccggaaaacgtcatgcccgcgtatgacgggctgagactgtccctgccgtaatgctcacgctgcatgttctcaggccatgactattccagacaattctgaccgtcccggcgcgcggataccgtgcgaaaccagaaacgtattcggcttttccgtagccgtcagttccgtggaagagatgtccgctgcgctggcggaacgcgcgctggaggcggaagctccgtttctggtggccgcggcggatgcccatgtggtaaccctcggcgtgcatgaccgggattacgggaacgtgctggaacggatggacgtgatttgcccggacggtatgccggtagtgtggagactgaaccgggggctttcttccggggaaagggaagcgtgccgcgtgagcgggccagatttgatggaagcgctggtgcgttcgaatgtgcaatatccgggcttgcgccattttttgctgggcggggatgagaagctgctggaagccctgtctggggcattaaaggaaaaataccccggttttcaactggccggggcgtattcccctccgttccgcccttggacggaggaagatctggaaaacatgcgggaggcggttgcttcaagcggggccaatgtggtatgggtggggctgggctgcccgaaacaggagcggtggatggcggagcagagggaattgctgccccccgcggtttatgtgggcgtaggggcggcgttcgctttccatgccggtacggtgaaacgggctccgcgatggatgcagaagaacggtctggaatggttgtaccgcatttaccgggagccgggaagactgctcaggcggtacgtgaagcacaacagcctgttcgtgtggtacgtgctgacgggcagatagggccgtttttccggtgtgcgtcccggagtagagccgcgggttattttatccttgtgccgttttcgtgcggccctatcatgattccgtttgaacctgaacggaaatggtgggcgctcttccctccttcgtccttaaccttgtttttcttatgttctttcgccgtattccccggaaaagctggtatgaaaaaactgtggaacgcgttttcagggacaggaagctgtgcgtggaaaagctgctctccttcggtttcgttcgtgtggaaagcggttttctgcgcagggcggcattgctggacggccagctctgcatggaattggaaatacacgcggatggttctgttcatgcaacggtgcatgatgcggacgggaagaatatccggcatgctgacccgggaacggaagacaggttgcggacaagaatgctccgcagggaatatgaggaagaactgtggcatgtggcggaatgctgctttgaacctgattttttcaaggcggctcccgcccggagcctcatcgcgcacatccgtaaagcttacggggaggaactggaattcctgtggaggaagtttccggggaacgcagtggtgcggcggaaggatacggaaaaatggtacgccgcttttctggctgtgccgcgcttgaagctggggggcagttccaaggaacgggtggaggttttgaacctgcgggtttgtcccggtgagtccgggattcttgcggataatcgcagccgttttccggcctaccatatgaataagaaaaactgggtgagcttctgtctggatggaaccgttccctttgaggaattggctgcgcgcctggaaaccagccggaggcttgccggaaagtgagctcctccggcgcgggatgtcgggagaaaccgtcttcccgcccccggatggacggccggaaagggggtcttgacccggaaagaggcggagcctacagtaagggcatgaatatagaagaaaaagctctgtccaccttccgcacggcgccctggcgccacaactgcgcccaggccgtctgcgcggccctgggcagggaggatttgctggaaaccgtttcctcctgcggtaccggaaaggctccagacggactgtgcggcgccctttacggggcgctgctgtgtacgcccgtgcagtccagggaggagctgaggcggcggtttgtggaaaagctgggctattcccattgcagggaattgaaaaaagaggggtccgtgccatgccgggattgcgttgcctctgcggcggttctggcttttaacctgagggagtgaacgcagaatgacactgccggattcatggtttttcatgaaaaaagagtctattggaatgaaaccagatagaataacatcatgaaaaaattgatctatatgatagcggcagcggccgttgcgattccggtggtggccctggcccagggagcctgcggcagcggctcctgctccaagggagacaaggacatggctgaagccaaagagcacatgaaagagggcgccaaggctgccaaggacgccgcctccgaaaaaatgaaggaaggcaggcaggctgccagggacgcctatgaaaagggcaaggaaaccgccaaggatgcttatcaggacagcagggacgccgttgaccatgcggcggacagggctgccgataaggccgaagccgtcggtgacgctgtgaaaaacggttaactcaaacgatgaacaataaaaatatttgcttattatgtgcgaatccaaggatcatatgaataagggctgcggatgtgcgaacgatgccgcttccggcaaaatggaggaaggcaagcacaagatgaaagacgcctgcgaaagaggcaaggaagccgtcaaggacatggctgaaagcgtgagcgacaaggccaaatccatgatggacaaggataagaattcttagtcccggcggcggttgaagcaagccgtttcccattcttcctcccgtgcgcgggatgacctccccttgtccggatttccggacgaggggatttttatgcgggccggttttccggggaaggggtgtcctgttccacgggctggagggcatgcaggctgattttatgccttttgcataattcctccacccggtcgcgttccagcaagatggttttgcccgcttccagggcgatttgcctgacgccgcattccgcgcacgtttcaatggtgacggggccgactgtcgggatatcaaagcgcatgtcatgccccaggcgggccactttggccagcgtggccggtttgccgttgcccagttcccctccgcggcgtatgcagttgttggtgccttcaatcgcttccacggcgatgacggtgccgccgtgcacgatgacggactgcccgatgtggagacggctgatttccttggccgtctgcatgccgaagcgggcatcctcccattgttcaggcgtgggaggcggtccggcgatatgccccggctgcggcatgtgctcctccatgtaggtggaggccgggaggatggtgaagccttccttttccgcttccgtgatgacggccccaagcagggagtccgcatttttttccggcatgcgcatcaatacggaaagggcgcgaaggtccggacggagggaaagaatgttcttcggattgatgccgccggccatgatgacgttccttacgccgtgctttttcaggaaagtgaacggcttacttatctggcccacgctgaattcctggtaagcgtcgcacagggggatgacggcggggttggtttcccccttgaaccctacggccacgatacgcaattccggcatccggcggcgtgcgccccggacaatatattccggataaacgccgtctccggctaccaggcctaatacgggcgggtctgttgtcatgcggcgtgaagctgggggaacggggctggttacaggtattccgggcgctggagcaattccgccacgcgcttgagcaggcggccgatgtccgctccgtccaccacgcggtggtctcccgtagccacgatgttggccttggagatggggataaacgcctccacttcgtcactccagaccggggttttggtgacggcccccacccccaggataatggattcgctgggcatgggcatgggcgcggcaaaggtgaggccgaagccgccgaagttggtgaccgtggcgatgccgcccgtgctgtcttccggagccagcctgcggcggcgcgcctgggcaatcagcctgttatagtcttccagaagttcttccatcgtccgttcgttcacgcggcgcagcacgggaaccatgacgccgtccgccacctgggcggcgatgccgatgtcaattgttttgggagaaagaatgttttcccccaccaggtagccggcgcattccgggctttccgccagggccagggccagggcgcgggcaaagtacagggtgatgccgggccgcagcggggaattttgcctgtgcttgatgagggggtccatgaatacgggacgcccggcggaggccagcggacgcgtccagctgcggcgcatggcgtccgccacggccagccgcatggatgaggccttgcggtgcggccattggctgacatattccaggaattcttccaggtcgtcaatggtgacgcgtccgcccgccccggaaccggagatgaaagcgatgtcggaggcgctcatgcccaattcatccatgcgcgccttcatccggggggacatgtagtgcgcgcccttcatgccggcgggtacggggaggccgcgcacgctgggctggactttcaggtccgttccgttttcctgataggattcccccgtcaccccgaagtggacgcctgcgggtttttcctcccggggaggggcggagggcgcggcctggggaacggattccggactggctggaagggacggctgggtggaatctccggccggagtcgctccggaacgctcaatttcctcttccgtggcctcaatcatggccatgcaggcgccgaccacgacggattccccttccttgatgaacacatcgctcaggatgccgccgcacatggtggtgacccccatggtggccttgttggtttctacctcaaagatttcctggtcggcttctacggtatcgccctgggccgccagcaggcgcagcacagtggcttccgcaatggaatccccgagctggggcatcagaatgggtactttaggcatgatggaaactgggttgaatcaaatggatagaagatggcggatggaggcggcaatggattccagcgtggggcggtgcgccttccagaggttggggtgctgggggatgggggtatcccgcgcgttgagcctctggggcggggcatccagcaggtggaagccttccgcgacaatgcgtgaaacaacttccgccgtgacgcctccccacggaaaatcttccccgacgaccaggacgcggccggtgcgcgctacggaggcgataacggtatccatgtccagcgggcgcaccgtccgaagatccacgacctccacttcatagccgctttccttctcaagcaggtctgccgcacgcacggcttccggcaccatggcgctgtacgccaccacggtggcatgcttccccgtgcgggcgatccgggccgtgccgaacgggatgaccggggtttcccggtagttgtcctccgccttcagccagcggtacaggaacttgtgctccagaaaaatgacggggtccggaatttccacggcctggcgcagcatccagtaagcatccgctaccgtggccggagtcatgacgtgcaggcccggataatgggcgaacaaggcttccaggctctggctgtggaaagggccggtgccgggggttcccccgcagggcaggcgcaccgtgatgttggcgggaatgcccgtgcggtagtaatgggtggccgccatgttgacaatctggttgaaagcgatcgtgctgaagtcggcaaactggacttccataatgggcttcttgcccatgacggcggccccggtcaccatgccggccatggcgtcctcactgatgggggcgtcaatcacccggtccgggaacagctccttgaggcccttggtcgctttgaaagcgccgccgaaaacgcctatgtcctgcccgtacagaaagacgtccctgtcttccgtaagcaggtctttctgggcgtcgtggatggcatcaatgtatgttacgctcatgggaatattccgtttgctggcttaataaggtctccataccgtggcgttccagtcttcccggaaggggtccggttccggttcccgctgcgcggtggctacggccagctggacttcatcggcatactgttttttcagggccgccgtttcttccggcgtgagccagccggctgccagcagctgccgttccgcgaccgccacggggtcttttttttcatattcctctttcagctccctggggatgtaggaggcgtcgtcatgttccccgtgcccgcacatgcggagggtcttggcaagcacccactgggggccccggccttccctcgcgttattgacggcggtccggaaggtttccagcgtggccatgaagtccgtgccgtccgtttcatgcacggtgaatccgtagccgcggcccctgtccgtcagggaggcttctccgaattccctgatattgggagtggagtaggcaaactgattattggttaccacgagcaccaggggcagccgctccacgttcgccatattggcggcttcgtgaaaagctcccgtggacgtggtgccgtcgccgcagaaagctactcccacggggccgggcagtttgccgtccaggcgcttggcgaaaaggcagccgatgacgaaagccaccgtgctgcccagatggctgataggagccatatagccttccgctggcaggccccggtggacattgccgtcccgccctttcataaatcccagggcggaacccaggtaggcgcgtgccgcttcaataatcggttccccccaggcgacgcgcgccgcctgttcccggatgaacggggcaatgacatcgtagccggcagtcagaaagacgcctccgcacgcggcaatcgcttcatgcccgcggcccagataaacgccccccgtaattttgcccgctttgtaaaggctggaaattttggtgtcaaaggcccgcgccagcaacatggccttgaaagccctgacggcattttcctttaagtccggttgtgtagtgtcgcaatgtgccaccccattattttatatgctgcataaggaaatgcaatgccatttcatgaaactgcctgatactttatgtccgcaggagcggggctgccccgcagggcggttcccggccgccgggaatgattttgcattttttgcttccgccggcggatgcgtggaaatttccggattcattttccacccggaggcaggctgcacctcagttcgaatttggggagtgccacatcgtaatcatctccggaaaacaattccgtttccataacgattttatcatattcctgcgcaaaaaggtccggaaaaacgcggggcgcctccgcaatgccgctttcctgcctgatggcgcagagaaaggaggcggcgggcagacgcatgatttctttcatctgccgggcctccctgccggtcacttccacctccgcatacagaaactgctccgttcctgctttccggtggaaggaaagcaggccggcttccgtgcccagccgcagccggcggcggtcaatatcatcaaagatgcgggtcatgaggatgttaaaggccggagtctgctgttttcccgcatagggcgccacccagcagtatttttccggcaatgcgtggacggcctgctctccatgaagcatgagatcctcttcccgttccatctgtttccggaatttttccagcaggcgcagtttttcccgaatatccctgattttccggtgtgccagcatggtgccgtgggagagaagtttcttataatgaatccttcgctggtccctggtcaggaagccggtgaattccttcaggggaatatccaggaaaatgcagacgcggatggctcccaccacgggaatctgggaaagagtgtaataacggtagccggtatccgggtccgtataggccgggatcaaaatgcccagttgttcataataccgaagggatttgacgtgtacgccggtctgtttggacagattgccgatagtcagtaaatgctgtttgtccatcctgtattgcggtcggtggaagggaattgattattaccgccggaaacgggcggcgcatgcagaagaaatctttctgaagacgacgttatttaattcagtaattattttattatcaatgatttgcaataaataacaaaaactgcgcacacgcaattttttcattgcctcttgactctcccattatgggatactttacatcatatggcaactgaaaaactccccggccctgtcgggacgcgtggttccggagaggggtgttgagacctcatacagcatgattcctgatgaacataattaatctttttttctgcataaccctgttgatgtttttttcttcctgccagcgggaggatgaaagccgggaggccggatttcccggcgaaaccgtgccggaagtgtctgtcatgacggtacgcggcgcccaggttcccgtaaccgccaaccttcccggccgtatggaagcttatcttcaggcggaagtgcgcgcccgcgtgacggggattattcaggaacgctgctatcaggaagggcagacggtccagccgggcgaccttctttttaaaatagacccggctccgcttcaggctgtcctggatgaatgcaaggctgcggtggctcgcgccaaggccgttctgtcggatgcggaggacaaggccgcccggtattcctccctagtcgccaagggcgccgtcagcatacgtgagcataagcaggccagggcggaggaagagcgggccagggcggaatatgccgccgcggccgcctctctgaagcaggcgcgcctgaatctggaatatacccgggtggaggctcccatctccggccgcgtgcgccgtgccctggtgacggaaggggcgtttgccaaccagaatgaattcacccacctgaccaccattgaacagattgaccccatttatgtccgcttcagccagccggcttcccagtacagcagcctgcgccgcgccgtcgtgtccggattgtggaaaggagtgccgctgggcgaaatcaaggtgcgtctgctgctctccaatggggaggaatacccccatcccggcaggatcattttttccgatatggcggtggatccgaatacggacactattgaaatgaaggccctgttccccaacccggacagtgaactgctgcccggcgcctatgtgcgcgtagtgtttgacaaggcggtgcgggacaacgttttcgccattccccgggatgccgtcatccgcaccgcgcagggggcgtccgtctttgttgtggggccggatggcgtgctggaaacgcgccccgtcagggcggatacgctgaacggccgggagtggctggtttcagaaggcctccgggacggggacagggttgtcgtcagccatatgatgtcccttcgccccggcatgaaagtccgcagcgccgccgtccgtccgcaatcccatgcccagcaataaaccgccatgcctgatttcttcatacgccgtcccatttttgcctgggtagtcgcactcctgatttccctgatgggccttctggccattcccagcctgcctattgcccagtatccggacatcgcccctccggtcattaccctgcgcaccacctatccgggggcttccgcccaggacacggaggaagccgtcaccgccgtcattgaaaaggagatcaacggcgcgcccggcctgatgtacatgtccgccaccagcagctccgacggcgccgtggaaatagccgctacgttccagcagggcacggacccggacattgccgccgtagaagtgcagaacaggctgaaaatcgtggaatcccgcctgccggaagccgtccggaaagaaggcgtgttcgtggaaaaatcatccaacaatattcaggcgatgatttccctctcttctacaggcagcctgaatgatacggagctgggggaatgggcttccgcccgcatcatcccggaactgaagcgtgtgaaaggcgtcgggcgcgtggagcttttcggtgcggagacatccatgcgcatctggccggatccggaaaaactggaggcgctgggcctgacccccacggatattgtcaatgccgtggctgcccagagcgagcgcatcatcatcggggacatcgggggggcggccgttcccgaatccgcccccatcaacgccggcgtggtggcggaggacgctttccgtacgccggaggaattcgcctccattgcgttgaggacgctttcagacggttcctccgtcaaactgggggacgtggcgcgggtggagctgggcgccaacagctacgcgttcttttcccgctgcaacggccagacggccaccggaatggccatcaagatggctcccggctccaatgccgtggaaaccatgggcctgctcaaggccaagatggatgaactatccagggatttcccgcccggagtctcctaccagattccctatgaaaccacccacttcgtggaaatctccatccagaaagtcatctcaaccctgctggaagccgtcctgctggtgttcctggtcatgttcctgttcctccagaacttccgggccaccctgattcccacgctcgtcgttcccgtagccctgctgggaacttttgccgtgatgtggctctccgggttctccatcaacatgcttaccatgttcggcatggtgctcagcatcgggattctggtggatgacgccatcgtggtggtggaaaatgtggaacgcatcatgatggaggaaggcctggatgcccggcgcgccacggtgaaagccatgaagcagatcggcggggccatcgtgggcatcaccgccgtgctcgtggcggttttcgtgcctatggcctttttcagcggagcggtgggaaacatctaccggcagtttgccgtaacgctcattgtgtccatctccttctccgcgtttctggccctttccctgactccggcgctgtgcgccgccatgctgaaaccctcctccgtggagcaccaggagaaaaaagggtttttcggatggttcaaccggacgatacaccggtccacggaccggtacggccgtgccgtatccggaatgatccgccgccctgtgcgctccctgttcctgtatgccctcattattgcaggggccggctatttgtacctgacgctgcccacttccttccttccggaagaagaccagggcaacttcatggtgacagtgtcccttcctgccggctctcttcagaaggaaaccagcacgcggctgcgggaagtggagaactacctgatgcggcatgagccggtggaatacgcctattccgtgggcggcttcagcttcatgggcaccggcgccaacatggcgatgctgtttgtcagcctgaaaaactgggatgagcggtccggtgaagacaattccgcccaggcgattattgaccgcgtcaacgcccgctttgccggagaccgccagatgatggtcatggctctgaacgcgccggccctgccggagctgggcaattcgtccggatttgatttccgccttcaggacaagggcggcctggggtatgaccgcatggcggaagcccgggacgaactcctggcccgcgccaatgcagaccccaatctggcgggcgtttatttctccggccaggcggatacgccgcggctgcatgtctccattgaccgggaaaaagccttttccatgggagtgcccatggcggagatcagcaattcgctggccgtcatgttcgggtccagctatgtgggggatttcatgcatgacggccaggtgcgccgcatcatggtgcaggcggacggaaaaagccgcctgaacggaaacgacattgaggaccttcatgtccgcaatggccaggggaaacttctgcccctttcctccttcgtccggctggggtggacggcggggcctccgcagctcacgcgctacaataactatccctccttcactatcaacggttcttccgcgcctggcaaaagcagcggagacgccatgaacgctttggaacagattaccgcctccctgccgcagggcgtggggttcgaatggacggggcaatcttatgaagaaaagctggccggttcccaggccacgctgcttttcgctctgtccatcctgattgttttcctggtgctggcggccctgtatgaaagctggtccattccgttggcggttattctggtcgtgcccctggggctgcttggcgccctgctggccgtcttcctgcgcgacatgcccaatgacatctacttcaaagtgggcctgattacgaccattggcctttccgccaagaatgccattctgattgtggaagtggccagggaattttaccgggaaggcatgaatgcggcggaagctgccgtcgccgccgccaaactgcgcctgcggcccatcctgatgacctccctggcgttcggggcgggcgtcgttccgctggcgttcgcccatggggcggcgtccggtgcgcagcgcgccgtgggcaccggggtgctgggcggcatcattacggccacgctgctggccatcttcctggtgcccctcttcttccgcctgacggacggaaagaggaacccggctcatccggaagaggcccagggccggattcccgccgcgggaaacttttcgtgaacgccgccggaataggggggcggagcacgcttgttttccccatggcaggggccgtgaaaggctcctgccgccttgttgcggtaggagttcccgcatgccgtgcacgagggttattgacgggcgtatttcgaatccgctatttagcgggccttccgatattaatgattctttttaaaagatatgagacttattcttccattgccgttgcgccgcttccggcgcggaatttgtggtggacgccgcccaggcagccaacccggggcagcatgtgtataacacgcttcaggaactggctgattccggagcgctgtcttccggggataccgtcattctgcataatgacgattcctcgctgaccgccggcttgccggtagccgtcaatttccgttccaatgatccgggtattttccgtaccattgatttggcaggattgggagaaagggaggtcctttatgatttttccggggcagggttaaatgacataacattggaaatgaattccatcatcctgagtggttccgtaaaccagctaactcggagtatgaccttttcttcgttaatgatagaaggtaaggtacaatttgaccgtaactgcgtagaaaacagaagagataatgtcgatagaattgccattgctctgttatatagttctcatcgtggagagattttgaagttaggagacggcgttattttttccaacaactgtgtgctaggcgttgataacaggtcggcccgtggcggggtattgttaaacagttcaatttcgccgatcaccataggagatcatgctgtcttctctggcaattatgctttcagtaatttgaatggagcttttggcggcgtattctactccgcgcgccatcgctctgttggcatgggatttcatggagaaatagctgtaggagccaatgctacattcatcaacaattatgctttcagcaattccactacagcttcggggggcgtgatttgctctagtggggatatctctttcagcgatggggcaacattcatcaacaactatgccaagacctcaggaggagccattgaattagcagggaaactcgaccttctcgccctgacgaaagacgtgcttttcagcggcaacatgaccgggggagtcttcacccgccatgacgacggcaccttctctgtggaaaacggcgtcgccaatgctattcaccttactacgggtgcaacaatccccgaaagtgctatagagacacagggcagtctcgccttagccgcggaggaggggcgcgaaatccgcttcaacgacccgattaccagccggagcgaaaactccgactgccccatgaccctcacgctcaaccgctgcacggatgaggaagggaacattcacgacacggacggaaccatcatcttcagcagcgaactctaccagggggaagaagcccacctcgttgccagccggtacaacaacttcgtggccgacaccaccctctatggaggaaccctcctgctggaacacggcgccgtcttcggcaggaatcttgaagacatgcggaatctgggtaatgactcttcttccctgacggtggaaaaaggtacgctggaaatcatcggaggaagcacggccaacgccgccgccttctccctctccggcagggacgccgtgctgcgcccgggtgacagcgccttcatcaacgccaacaccgccgacttctcccgcggcttcaccttcgacatgcgccaccagctccagtccgggccgggctccgggccgggcctgacgctctccgcggctcaatccttcacggccggaggcctcatcggcgtggcggacacgggctccaacgccccgtacttctatgcggaccgctcctggaaacaggaccgcgtcttccacgtgctgacggacgcggaacacacccttcagggaaactttgacggagtcgtctcccaggccacggggacggaccgggtggactccccctactcctacacgggaacctggagccaccggtggacggacgccgacggagacggctacgccgaacagctccagctggtctggaaggcggacggaacccccatcagcagcattgacccggaactggttggggaactggccttcaactccctctggagctcagcctccaacgcggcggccctgggcggcaatgtcctttcccgcctgaacgtcttccgcctggccgacaagcatgcccgcgacctgtggggcatgggcctgggagacttcgccaggcagcgcagccggggaggcgcggacggctacgactacagcggaggcggctactccgtgggggcggacagcgggttcggccatgacaacggcatctgggggatcgccttcggccagctctacgggcatgccaaaagccggggcttccagggccggaacacgcaggacacccggatgggctccctgtactggggccgtctgctggaagaaagcaggcgcgcccgctggaccttcaagggaagcctcacgtgggcggagacgcacaacaaaatgaccagccgcctaagcggagctccggcttctacgggcaaatggaacaatgagacgtggctggcgcaggcggaagtgtcccggacggcggactatgccgggggatggaggctgacgcccttcctgagggtggaattcacgcatggccggcaggacgccttccgggaacagggagggtatgggcgtgatttcggaggggcggcgctgaagcgcctgtccattcccgtggggctggaaataggcaggacggacgaatggaagggaaggccgtgggcgcaggccctgcgcgtatcctacgtgggagacgtcttgcaggacgtgccggaaggaacggtgtacagcccgtacagcgacatgagctggagggggagggcggtgagcccggaacggcacggtttccgcgcggagtacaacacgtccctgcagtgcaatgagcgctggagcgtgtacggaggctacagcctggaagcgagggggaactccctgtaccaccgcgtcaacgccggcgtggcccggagtttttagaaggctcttcgaggaactcaactataaacatcatcctattatttcagcatgaatatacgcaagaaagtgatatttgccgtcatggcgctggctattccttcatcatgggcggatattccggaatcctccgtacccgtcgcggccgtctctgccgttaaaggcgcctggcccagggccggcttcattgaatgggacgccagcgggtcaggaaaactttatgaggccgagttcaaaatcaacggttttgaatttgacgtcaaagtgactcctgaaggaaagattgtccgggtgaaggaagaaatagcggtatcttcccttcctgagccggttcgcgcggccgccctgaaaccgtaccccggcggcagaatcagggaggcggacaaagtgacgcagggagaactcatccgttacaaggtggaggtaatggacaatctggacgattacgatattctgctgactccggacggcacgatcctttacattgaccaataaatggctccgcccataagggaactccgtgtcctgccgggtgaatgccggtgtggcccggagtttccgagaacaattcttcagtaataacctgaagtcatcaaggaagtaaggagaggggcgttttccgcgcgggccgcgggagacgcccctttctgattgatgggcgatcgtcgggacgatgacgatattttgccggccccggatggcgctctcttcttgacgtggaatatgaaacggctctggccatacagccggaaaccggcaccgccctgtcaggtaaaaagccctgacagggcggcgcttttttgaaaaaatcccatcgcctcacgggggcgctggcatttgttttttccattttccctgtgcgcggtgcggcatgcgcccaagtggagtttgtgggctggcggccgggccaggcagtccggacagttccggacggaacgcctcggggtttccctccgcagcagggcacgggattattccctgccgcgggcgttcaggaaaatgaacacgtaatacagcagcatggccagggaggaaagcgcgcctaccacataagtcatggcggcccagaacagggcgctcttggcccttccatggtcgaaatagttcatcaggtgggagcggtccagccatttcagggccctggcggaggcgtcaaattccacgggaagcgtgatgaacgcgaaggcagtggtcacggcaaacaggccaatgcccagccccagcacccacggagagccgcccatggccagcagcacaatgccgatcatcagcacaatgcccaccagattggaggagagctggacgatgggaaccagcgcggaccgcaagcccagccagtggtaagcctgggcatgctgtacggcatgccctacttcatgggcggcgacggcagcggcggcaatgctgttggaattgtaaacggactcgctcaggttgacggttttatctgccggattgtaatggtccgtcagatggccgggcgtggaaatcactttcacgtccgtaatatggttgtccttcagcatctgctccgccacctgcctccctgttacgggaatggaaatctgggaatattcgctgaagcggctcttcatgcgcgcgctgaccagccagctcagaagcatggagcccagcagaatcaaccagtaaatggtataggaatgcgttggggcggtttccgccgtctgtaccgtataggaaaggagatcgatattgaataactcaatcattgcaaatttgaccttatatcatcaggctttgttgaatccagagggcgccgtgtcagcctccggggggagttccccggcttctgtcatacggaaatatgcggaaaaacggcgaattcaatcatccgttttttgagagaggagcttgccgtccggagaataataaagctccactttgcgcacggcgggggattcggaccggcagtccacccggtactttaggactcctgtccgtgattttcttgttgatgcggagaagatatttacaaagtagattgatcgaaaaaatcccatttccagaacagaggatagaatagaaaatgaaattatgacgggaatggttattgttcctttttaaccaaatccgggtacttggtggaaggaccatatttattgtcatctatttcggaatccttacaaaggataactaaattgacaattccaagaatgatgcacatcaataaagagcacacaccaacagcagatgatggcgaggtgaatatggcaagaaataacattattgtactaattaccgccagccatacggctaaactgccggaatacccagcatcatggtaacgctttattgtaataggcaaggtgtagaatatctcgaacaacaatagtaatattacggagacaataaattctgtcaggtcaaatgcagtttctatgaaactattacatataattctacctatcatgataaatgtgaaatagcgtacccagtattgttttctcgtcatacgccctccatacaaagatggtttgaagagggtgcttttttcttttttggtaggctcaacaagagttactgtcggagaatgcaaaggatccatattttttcaaaatagttaaataattttattaaataatgggaaataccctccttatcaaggctaaaatgcagtgaagttttatagcggggagatattttttatgaaaagcaacatatatggatgttttgtgacaattcagccatcaatgaaatgaatccgggcatggcggggtttcttgtcgccaaaaagcggatggtggagttgaatggcggcatgcaacagggtattgtttatttgcttggagcgggtcccggcgaccccgggttgataaccgtccgcgggcgggaactgctgggaatggcggaagtgctggtatatgatgcgctgagttcggcggaaatgctgaactgggttcctgttgcatgcgaaaggatttttgtgggcaagcgggcttcccgccacgccctgccgcaggaggaaatcaacgccctgctggtcaggctgggccgtgccgggaaaaaagtggtgcgcctgaaagggggcgacccctacgtcttcgggcgcgggggggaggaggctgacgccctgcatgaagcgggcatcccttttgaagttgttccgggcgtaacttccgccattgcggggcctgcttacgcaggcattccggtgacgcaccgcgggtactgcacgcagtttaccgtatttacgggccatgaaggcgagaataagaaggcgtcttccctgaatttgaagggaatagccgaagcgcagggcacgaaagtcatgctgatgggaatgcagaaactggcggatgtgtgcgaagccctgatcgggtacgggcaggaaccgtctgtgcctgccgccgccgtccagtgggccaccacgggcattcagcgtacggttacgggaactgtgaaaacactgcccgccagggtgcaaaaggccggggtgggcgctcccgcagtagttgtcatcggggatgtggtgaaagaacgcgagtccttgaactggtttgaaaaactgcctctgttcggcaagcgcatcgtggtgacgcgcacccgtgcccaggccggggaattgagcgcgcgcctgcgccgtctgggggcggaagtgctggagatgcctgtcatacgcattgccccaccctccaacaggagggaatttgcggaaagcgtggtgcatgcccacacatatgactggctggtgttttccagccccaacggggtggaacgcttcttccaggcgttttttgccgtgtacagggacatccggagcattggaggggccaggattgcggctatcgggccagggacggaggcgaagctccgggaatacgggctggccgtggatatcatgcctaaaaagtttgtggcggagggcctcgttaaagcgttcagggacgcacgcgaagaaataggaaccattgagcacagcacattcctgtgggtgcgcggagaagaagcgcgccgcgtgatttacgacgggttgaatgcgctgggcgccattgtggacgaatgcatcgcctacaaaacggaagcggaaacggaggatgtggcgggagcccaggcggctttccgcgaatgcggagcggacatcgtgacgttcaccagttcctccacagcggagaatttcttcaagctggggcttccatggccggaaggatgcagggccgccagcatcggcccggtaaccacggcaaccctcaaggaactggggcataccccttcaattacggcgaaaacacacgatatcaacggtctggtggaagccatcgtcaaggccgccggcaaatagggaaaacggcgcggacggcgtgaaacgccgagccgggcagatgggaaatacaaggcggggaacgccgtttaaaagccattgacggcttcccagccgatgaccttcccgtcttcaaacaggacattgcaggagacgggcgggcggctgcccagaggcatcgtgacgcctatcccggtgcctatgccggaatccctgccccggaatcctcctccgcccaggcccagggaccagcccgtgccgctccgcgtgtaaatccaccgttccgtatttttcccgttcatcctgcccgccattttctgttcgggttccccccatgccagcagaaccgccatgggagacattcctttttccagctccccgcgcgccactttggcctgatgctccttcgggagctgttcataagccggcatattcttcgcaatgcggtcggacggtgtaggggagcaggctgccagcagcatgaggcaggaaggaagaaggacgaaagaaaaaccagttttcatcatcccgtaaatagcacggcagcggatggctggcaaggtggcagagcggcttttcggaaaaatggggatgagggaatccgttattttgacataaaagcgcgcttttcccgtaaatacataattggttattgacaagcatggggggtaggggagtaggaattcagctccaaatgcaacgcccccttccccgtgcgggcagcgtcgcttttattgttcagcacttttttccgagccgccgatatgtccaaaacgttaattatagcagaaaagccgagcgtcgccactgatttggcgagagtgctcggcaaagagcttggaaaattcacccgggacaagtccggggcattttaccagaatgaccgggccatcatcacctctgccgtaggtcatctgctggaacagaaaaaacccatgacggaagaaggaaagtccctgccgtggaaattcgactatctgcccgtcatccccaggaagtttgaactggaacctatcaagcagtcggaagaccgtttgaaaaaggttcttcagcttgccaggagcaaggacgtcacggaaatcgtcaacgcatgcgatgccgggcgtgaaggggaactgatctttcacaatctggtgcgttacggaaaatggaccaagcctacgcggcgcttatggatgcagtccatgacggatgaggccatcctcaacgcatggcatggcatgcgcagcgaagctgacatgaagcccctgacgaatgccgccgtctgccgttccgaatcagactggctggtggggctgaacagcacccgcgccctgacgatcctgcaatcccgcggcggcttcaacgtcacccccgccgggcgcgtgcagacgcccacgctggctattctgacgcagagggaattggaaatccaggcgtttgaaccggagccctattcggaagtatgggccgaattcgacgttcagtccggctcttactccggccgctggattgaccgtgactggaagaaaaacgatcatccccactcccgcgcggagcgcatctgggatccggaacaggcggccgtcatccgcgaccgctgccgtggaaaagccggcacggtgacggaagaaaagaaaccggtcacgacggtcgctccgctgttgtatgacctgacttcccttcagcgggaagccgccaaccgctacggtttttccgccaagcgcacgctgcagctggcccaggaatgctatgaaaagcacaaggtgctcacttatccgcgtacggactcccgctacctgccggaagattatctgggcaaggtttacggcatcgtaggcacggtggcggagcagaacccggaattcgccccctttgccagggacattttggacaacaagcgcatcaagcccaaccggcgcgtgtttgatacaaaaaaggtgagcgaccactttgccatcatcccgaccgggaagatggagaagcttaccggggacgcgcagaaactcttggaaatggtcatggcccgtttcctggccgtcttcttccccgctgccgtgtttgaagacacgcggagaaccacgctcattacccaccaggacggcgtgacggacgctttcctgaccacgggccgggtgcttgtggagccgggctggcaggccgtttacggacggaaggccggcacttcctccaaggaggagctggtgcccgtccgcgacggggagcaggccgccttgcgtgagattgaaatccgcaacgccatgaccaagccgcccgcccggtacaacgaagccacgctgctggctgccatggagggggcaggaaaactggtgcatgacgaagaactggctgccgccatgagcgaacgcggcctgggcactcccgccacccgcgcctccatcattgaagggctgatttcccaggaatacatcgtccgggacggccgcgaacttctggcgacgcgccgcgggattgaactgattgccctgctggaacgcatcggcctgaaaacgctcacctcccccagcctgaccggggaatgggaatacaagctcaagcagatggaacaggccgccctgccgagggattccttcatggagggcattaagaccctgaccggggaaatcgtgaagagggtgaaggatttccgggaagcccagcagcaggtggaactgccggaaatggaattggactgcccttcctgccatgcccacggcctgaaaaacacgctggacgccgtttcctgccgttcctgcaagttcagcatccgcaaagttatctccggccgcgacatgacggatgaagaattgaagacccttattgtggacggcaggacgggaattctccacggatttacctcccggttcggcaagccctttgaggcggggctggaactcaacgacaaattccgggccacgctttacttcccggcgcgggaggaagatgaagccgcaggggtggaggaagccgtgaaagtggcttccgtcgccattccggacatgggagagcatgatgtgatggaaacggccaaggcttggaaaattccttccctgacccttggaaaggaacatgccgccgtctccgtttcccggactatcttgggacgtgaaatcccgctggaccaggtattgaagattttggcggaaggaaaatccgatctgatgaaggggttcatttcgcagcgtaccaagcgtccgtttgacgcttatctggtcttcaatgcaaagacggggaaaataggttttgaattcccgccgcgggaaaggaaatatcccgctaaaaacgctgccggaaaaacggaaggcaaggcggagaagacgggccggaccgccgccaaaactgccgggaaagactccaaatccgggggggctgccaaaaaggggcgcaagcaataacggcagcggaaacattccgccgggaacgaagattgggaaaagagccgggaaaaagcttcttcccggctgttcccgtatgttagcttgaaagcgcacccctggattcctgacgatgaaatgccttttatttgctgtgctggcgtggtgcggcgcggtttgtgcgccggcggaggaatatgcctttccgggggaacgggaatggatttccagatttggagatgtggtgaagggcagtttccattcctgcacaggggccggggcagttctgaaaatagggcgaaggcatgtggaaattccgttaacccgtctggatgaggaagacgctgcgcttgcggcttctctgacgggagcggaggcgcgccggaacctgaaactggccgcgatgctttggcctttcctgatgaaggaactgcagaaggtgacgtggacgccggcagaaaagaatatctcgccccggtatcatgaaatggcccggaagaagaatgccggagctttaacgggaaccagaaaagtggatggactggtttgtgccacatcgctttccatcattcaggggcctccgttccgtatccgggaatacttccgtccgcaggcgcgtccggaaagcggcagggggcagaagaatttcgatgtggttctggagcaggggagccgctgcgcttattatgatatggataagggtgttcttattccctccaaatgcctgtctgaggaacggacggaaatgcgcgctcccgtttcctctctgctccctccggcagaacagcttgccgcgagagaatcaaaaaattacaggaatgcggattactccctgcttgtggaaaaccgccccgtcaagggagcctatgaaacgtgcaagcccaattccctgggaagaaaaaagttggtcatgtactggaatacggagggtgaaatggtttgcggcgtcatgaagctggactacgacaacatgcgcgtggccgcattattcgatggacggcggaagctgatgaacgcccctgggcttggatatgccgtgattctttcccggctggataaaaaaggcaggggcttgaaggagaaaggccgttactaccatgtggcgctggctgcagacggcctgcccgtgtattatcatgagggcccggaagatgaggccgccatgaacccgctgctttacgggaaactacgcgattccgagaaaaaggcggctctggcggaggagaaaagacgtgaacaggcattccgggccaggcgggaagcccggcggcgcctggtggaatccgccaggaagcgtaatacctgaaaatagttcctgtcttttcgcgacgggtatccttcttttctggaaagcgcccgtgaatgttcttctcaggagcgcagccctggcgtatttccggattttccagtctttcagaaaggctgattatttattcctgccggggaatttttcagaactatccgaaataattaaaaaacgctgttgttatccgttatctgagagttccacggtgcggaacaaacccatcacacggattcggctggctctttttccagcggtttgtgatcttctatcaatcttttgatatcttttcttgtttttttatctctcgattttcctagctttctgtaaatatcggtcatgtcaaagtagattaatttttcctgaccctgatcatttctaatagaaataatctgaatatatttgccatcatgcatggtatatatgtaccctagtatgccatatccctcatagtgtttcctgatatattccttctgagattccctgatatcgtctgttttcttgattcctgtaagaataataggattgatgattgaattttccctgtcaattttctgactgccgggaattacatcctccgaaccggcggcattattaatgcaaaaacagggaaagcaggctatcgacaaaaaggcaattttcagtaatggtttcatatcagtttatttattaatcagttttatttatttatgttgtcattgcagccgacgcaggtgcagcctacttcgttgcagttgccgcattgcaaaccgcattcttctgtcaaacgcagccgggccattgcgatgactgtgctttctccttctgcatatgcctcggctttgccctctttttcatcatctgtaccggttactaccggggtaattgtctttcgcagcggtattggcccccctgtctcacccgtgtgatgaacgcttgtatacttacaggatatatagactgtgtaagtgcgtttggcgttggctaccctgactggctctatgtttaaattttttaattcgtattcacattttaattcctttgcattcccataattgcaaataacaaaggtcaaaatgcccaataactgcaatatctttttcatcctaaaattatgggacaattttgatatatgtaaacatatttttaatatgttttatataatgattgcttgatagatagttacaaaaatatctaacaaaataatgattatccgggaaagaccccggggaggatgaggcgctgaataggagtgtccggcgttccaacggagaaacaacgccttcgcatctcgggagaagttgaaaatgcccggattggctttaattccgcccgaaggcgtggattttaccgggggcatgccgccatgctgcggcgttcagcaaaggcacagttgagctgcgggccctttatatttatccgccatacgggataaaatgggagattctggtatgccgaggggccgggattccactaaaatgccatgtttctggcatgaggaggctgttttctctggagcctttcagtttgagttcctgctggttttccatgaacatggtgccggattgttccctcaatgcttccatatggcgggtaagaagctgctggcttcgatggtccgcatctgagcatcctgtgaaagcgcttcatggttttcaagtttccctgttgatgttgagtctcccgcagtctttttcgatccatccggagaggatgggaccggtgaatcggattcaggtcaaataacctgttccggggtggttcaggaggcatcaaaagctttcagcactatttcttattcccggtccgtgttccggattttgatgttgatgaagattgttcccggacgggtgttatttgccgtcttttacggccgtgtacattagccgtatcaatggaggcggatcctgctttccgcgagccggaaatgcggtgaattcccggtgttcagccaatgcatattttcagggaaagaagtgattcctgttctttcctgaaacatttcctgccttctttatgccggaagcggcaaaggggcgtgcggcatatgcggcagtattatcttcctgcctggaggcagcggtagtaataatccacgcgggaaatgaaccagctccatttgtacccggggcgcccattagtcatcagcggggcggggcaattcttgccggaccagtagttgtgaggcactacgttgcgcagggggacgttgtagcgcatcatcagcagcgccgccagcttggccgtcttgttgtagatgacgacagggttatgcgtggtgcattcacacatttcaatggctacggagtattggtctcccggtccggaatggtccgcatggtggccggtttccgtagtggggatgtgctggtaggcgccgaattggtccacagtgaagtgccagttcaggctgcgggacttgccgctgttcaggtaacgggagtgggcattggcgtctcctttggggttggcggtgctgtggatggtgatgaagcgggggcgcatggaggatgcgcgcttgcgggcatacgtgtttttgggcatgtaggaaactttaatgcctacttcacggcccatctggccgggtgtgcggggaactaccggcgccttttgaattttaaaggagacggccggcggcctcattttgtcgttctgcgaacagctgcagaacgtcagggcggcgaatacggcaaaaaagcccgtccagacaaatctatattccatgcgtttgttctaggaacagcctggaaggattgcaagaagaatttggaattagttcggatgaactaatcaggccgtgttgtgaagttgcaggtatatccggtgcggatgagacggacggggccgcgccttcgggaggaaggggcccgtccgcgaggggaagccgtaccgggaacgcccggtacatatcccgttatctgaggatttgggtaaggacatattgcaggatgccgcccgccagatagtattctttttcaataggcgtatcaatgcggacgatgacaggcacgtcaaatgcttccgcatccgcgggctgtacgcgcagggtgacctgctggcgcggagcgatgccgttgttcaggcccaggatggagaaggtggcgtccttcaacggagtgatgcggtcataatccgccttgttggcgaagttgaggggcaggacgcccatgccgataaggttggagcggtggatacgctcaaaactcttggtgatgacggctttgacgcccagcaaattcgtgcccttggccgcccagtcgcgggaagagcccatgccgtagtcttctccgccgatgacgatgagcggaacgccgtcctgagcgtaggccatggccgcatcatagatgaaggcgggcgttcccgcggtaggggttatttccttgtccggggcgggaacggcgcggttgccgaaatacagtgtgtaaccgccttccgtgccgtctaccatcaggtttttaatgcggacattggcgaaggtaccgcgggtcatcacgcggtcgtttccgcggcgggagccgaaggagttgaaatcttttctgtccactcccatgccctgcaggtacagccctgcgggccctgtttcccggatggctccggcaggggagatgtggtccgtggttacggaatcgccgaaaatgcccagggggcgggcatccgtgatatccgccagtgtgcggggctggccgttgaagccgctgaagaaaggagggtcctgaatgtaggtggattgttcattccactggaagacagagccttccggcgcgtatacggccgcccagcggggattcttgtccggcgtgatggtgtaaagctcccggtatgcttccgggttgcgggatttggcaacggcttccgcaatttccccggagctgggccagatgtccttcagaaatacggggttcccgctgcggtccgtgcccagcggttccgtctggaagtcgatgtccacgcggccggccagcgcaaaggcggcgaccaggggaggggacatcaggaagttggtcttgatggaggcatggatgcgggcttcaaagttgcggttgccggacaggacggaagccgctacaatgtcattgtcccggacggcctgttccagctccggatttaacggcccggagttgccgatgcaggtggtgcagccgtagccgacggtttcaaagcccagagcgtccagggattcctggaggctgttggttgcaaagtaatcggaggcgatacgggaacctggagcaatggacgttttcacgtgcggaggcacgttcagcccccgttcaaccgcttttttggcgagcagcccggcggcaagcatcagcgccgggttggacgtgttggtgcaagaggtgatggcggcgatgaggatgctgccgtctttcagcttcgcttcctggctgaaaccgtccaccggaacggggacgcccgccggggagtgcatggaaaccgtgacctccggagattccttcttgccgtaacctccttccgccacgggcatgctgacaagcttgcggaagctgtccctgatagagttcaggcgaatgtggtcctgcgggcgtctggggccggagacggctggttccacggcagacaggtccagttccagctggtccgtgtagtccagatctccgttacggggcattccccacaggttctgtgccttgaagtagttttcgtacgtagtgatggcttcttcgctcctgcctgtctggcgcagatagtcggagcagcgttcatccatggggaagaagcccatggtggcgccgtattccggggccatgtttgctacggtagcccggtctgccagaggcagggccgccgccccgtctccgaagaattccacaaatttgcctacgactccgtggctgcgcagcatctgggtgacatgcagcgccaggtccgtggcggtcactccttcgcggagttctcccgtcatatggacgcctactacttccggcaccaggaacgtgacgggctggccgagcatcccggcttccgcctcaatgccgccaacaccccagcccacaacgcctatgccgttaatcatcgtggtatgggaatccgttcccaccagggtatccgggaagtaaacgccatccttttccatcacgccctgcgccaggtattccagattgacctggtggacaatgcccacggacggaggaaccacggaaaaagtctgaaaggcctgctggccccatttgaggaattcgtagcgttccgcattgcgctggaattcaatgtccaggttcttttccagagcatccgtgcatcctgcccagtccacctggacggagtggtccaccaccaggtccacggggaccagaggttcaatgacggaggcgtcttttcccaatcctgctacggcggagcgcatggccgccagatccaccagaagagggacgcctgtcaggtcctgcaggacaatgcgggctaccgtaaacgggatttcataggaaccgggattgttggcattccaggaagccaggttgtccacgtccttttcagtcactttcaggccgtcgcaattgcggagcagggattccagaacgatccggatggaaacgggaaggcggttcaggcggggatagccgttttccgccaaggctggcagtgaataaaactgtcccggggttccggctcccgtgatgaacgtactcttggcaatcttggtcatgatgcggaatagagggttaactgtaaacaggcggctgccctcctggcagtcgcgggtactatacaggccaaatgtgataaggcaaggactctgtgtgacggagggcggatttttccccccccttccgaagccggggaaatttttctctgaaccggggcggccgctttttccggcattttttctccatgcacgccgcaggaatcatggagtgcgtcatggaacattgaaaatgagttcgcagtattgtccaaccctgtgaaaggtttcaagatgatgaacgcaaaaaacatcttatcaatcatagcgggagcgttggcgctggctgcctgttctggcccgcaggaagagaatttgcgcatggtgcccctgaccgtgcctgcaaccgtacccatgacctcctacggaccgcacgcgagggtggttgtagcaggaattgattatacggaggtgcacgacgaatggatgaatcccgatatcatgaaaaaggctaccccgggcaatacgcgcgtggtgatcagtcgcggtcgccaaaggggccagttgatggtgggggatgaggtagccatggattttcccgtttgcgtgggtaaggcttcccaccgcacgcccgtgggccatttccgcattacggaaaaggcagtgcatcatgtttccaatttgtatgatgcctccatgccttacttcatgcggctgacggacagcggaattgggatgcacgtaggccctgttttccagacgccgcagtcccatgggtgcatccgcatgacccgctcttcctgcgtgccgcttttcaaaactgttaaggtaggcacgcccgttacgattgtacagtaatgcccggaaaatttccgggcgcttttccggaagaaaaattccccgcattttttaaaaactcatttttttaaacaaaaaaacgtcatccgccgctattttaataaacgacatgtagataaacggtacttgccgcaagtcgcattgccttagcaacccgaaccctccatgccgctgccgatgaatgaatacgatacagtcggcagcggcatggagggaagccgtctgcttgaccgcagaacttggggaatgaacgggctgcccgtatttcgtgaagaggacatggtgcttgttctcccggggccgcatttgttcctccgtgttgtaaaagattaatggagaagaaggattggcctcccctgctttttctccggattatttttccgcagctttcctgtctgttccttcccggtgtagcaggggaaggtattttccataaccctgtgcttccatgtcctgttcaggaatgaatttcagggaggcgctgttgatgcagtagcgcagtccgccctgttccttcgggccgtctgtgaaaacgtggcccaggtgggcgtctcccgttttgctgcggacttccgtgcgcctcataccgtgggagaaatcctgtttttcctgaatcagttcttctttgatggggcgggagaagctgggccagccgcagcctgaatcaaacttgtccgtggacaggaataaaggttcgcctgtcgtgacgtccacataaatgccgggtctgtcgttattgaaatattcattgcggaagggaggttccgtcgcgttattccgcgtgacggcaaattgctcgcgtgtcaggacgcggcgcagctcttcgtccgattttttccggtaaacaggttcgttttcgcgggcctgggacgcttcccggaatttggcgggtggaatatggcagtatccgccagggtttttatccagatagcgctgatgatatttttccgcccgtgaaaattggcggaggggctgaacttcaattgccagaggctgcctgaagtgctgctggagccttttcagggacgtttctataacaggtttgtccttctcatccgcgtaataaatgcccgtgcggtattgaattcccctgtcgtttccctgtttgttgacggaaacaggatcaataatggagtaataccgttccagaagaaagggcagactgagttcttccgggtcaaatactacttttaccgtttccgcatggcccgttttcccgctgcatacttcttcatacgtgggagaagccgtggagccgttggcatatcccacttccgtttccttaacgccgggcatcagggagaagtatttttccactccccagaaacagcctcccgccaggtaaatcgtttttaaatccttgttgtccatatgaggtttgtcattactgcttgcctggcctttttccccgcaggaaaaaaaggagagcatggcgactgcggccaaaatggcgcatgccagtccggccagtgtccatggtccgtggtaaatacgcttcataaacgctgtatggagtcgccttccggtgcgggagcagcggctccctgggccgggcaactgctgtcccccggcttttccggaaaggtaaatgattagacaacagcgggttcattccgttcgatacctgtgtccatatttccttatttctcccgtttttccgccttcatcctgtttttcagccactggtaaatagcccggtcggaggcgtccggttttctgcttgtctgcatgctgaatccgtatttggttcggaagttgaaaacggccagagaagggctcaggccgatggaaagcccctccatccgtatttccacctcttgcgggacatggctggagaagtcgaggcgtccggcattggtgacggtttccacatagtgtttcaggaaaggctggatgctggccaggaaggagggttccagagccatgcggcagcgttccggggaagaattttccctgacaagaatggcggaaggagctgcgatggcgtgggcgggccttaacgtattcagcggaacattccataaaaaggaaaacagccccgtgcccaggagaaaaagaaggacggccagagcgccaagccatttgacccgtttgtttactgattgatgacagggccggccttcgttcatggagagaagcatggcataatattccatggtgatccatgaaagaatttgccaggaagcagatgggaattcccgtccccgcatgagggaatttttgtactataacatgaaaagcatgaaaaaaaacgctggaaatcatgtatagtatcattaaatattaatgtagtgtatgagaaaagattccatttttctttccatttttttatttttcctttttctgacaatctccgtaaataaatccctcgcggcaaaatatccttcgctggatgttccgaaagacattttgctccacgtgaaagaagctgcttcctcccagtccccctattccggcaatcattctgtaaagcaggctgtggacggctctatggaatccgccaactggcatgttcccggagtgcatcatgtggagggggaatttgtgtttgaagtgccggagaccattcattacatcattttttccggagccgatttcaatgaaattgccgtgtccgccatgtccggctcgtcttggaaggaccttggaaaattcgatatcggcggctccaggatgatcagatttaaaaagcctcttcaaaaggttcggaaaatcagattgacggttgattatcccgaaggttcctctccgtcttttaccgtacgggaaatcagcttttacaaaagggtggagtccgtacttaaccggaaattgctgaaagtatttaaggacacgagctgctcctccatcaatcccaggtgtaccttgacggacctcaaggctcttccggagtttttgcagatgattgcgaagaaaataaaatccggcgattatgaagacaaagaattccgcattgcttcctataaggcttacagccatccggagtttgctgcgaaggtgagaaatatcaacgccctgaacaaatttgacaatcctaccggaattgtcgcggagaaaggagatgaaattcttgtgttcgtaggacctacccatggagaagatattgggttggcctccgtttctccagcgggaatagagtcttcctcctatcctttgaacgaaggggtaaacaaaattagaatcaaccgttcgggattgctttacgtgatgtatcacaccgatatcagcacgcccaagaagccgataacggtgcatattcctgtgggaagcggcatagtgaatggatattttgacgtgacgaggcacacggataaggactggaagcgtatgatcagcaacgccccgcatagcatgttcgatatcgttgggcggaattccatgatgattcttcacacaaagtacctgaaagattacagtccggattccattacgaaatccgtcagggtatgggatgaaagcgtcaaggccatgtggaaaatcatgggatttgacaagtatccccagccgcacaataaccggcagcttggcgtttccgtagaaggaggagcccatatgtttgcaacctggtattactgcggctacagtattggagatcagggaaatacgctgaaaaatgaagtgctcgctcctggagttcttcagggaaaccgcctttggggaatcgggcatgaaatcggtcattgctaccagcatccgttcaactggcgcagcatgtcggaaagttccaacaatttttttgcccagctgattctggaccaggtgaccaatgccattaatggcaatgagcaggcctccgatatggaaaacccgtgcaaatacctgctttcagaagcggtaaagggcatgccgttccatgatttgaacggctgggccaaatggggttttgctcaatattccttttatctgtatttccataagctgggaatcaatcccgaattttatcctaggctgtttgaatcattgcggcgcaagccgctttccaggcaggcgtatgaggtttccgaagcccatttggccttgtatgaacgcatttgcaatatcagcaggacggactttaccgatgactttgaaatttttaattggtttgtcccgattgaccgcaaggggcatcaatatggggattacagttttaaaatgacagaggaaatggcccgggcatccaaggcccgcattgccgccaaacggtaccccaaaccgaaattccgcattgccttcctgcatcagcatggaaagacggtcaatttgtgggggcagaatctgcatgggtcccagctcaacggctattggaccaaatacaagcagaacgcaaaactcagcccgtctgtaagcgcctccaaaaaggataacatgattattgtgcggaatggggaaaatgcagccgctttctgtgtagtgaccaatggaaaggtggtaggttattatgaccgtcagaagtttgacgtttccggcgtggaatggaatgatacctctaaagtgtacgccatcccgattcagacggcggaaccttataagttgatttatgctgccgggcgttcctgaccgtgttttgaaggtttgggaaaagcctcccggaaaatcatattccgggaggggcgggtattgggccgcctgctattcgggtgccttgaagttatatacgggcctgatgcgttccacgatttccgccgtttcatggatgttgtccagcacgctctcgccatccttgtaggccattggcgcttcatccagcgtagcgcgggaaacgcaggtggagaaaataccctgcatggaagcctcgaattcctccagggaaagattggctttagcctttttgcgggacatgctgcggcctgcgccgtgcggagatgaggaattgaattcttcatttcctttgccgatgcagatgacggagccgtcacgcatattcaggggaacgatgagtttttctccgcgtccggcccggacggctcccttgcggatgatttggtcttccgcaatgtagttgtgcacggtgtcgaaactttccagatcatctgcatcatccagcagttcatgcagtatcacgcggcggttcagggctgcgaagcgctgagccaccttcatatcccgcatgtagttcagcgtattttctccctgaaggtagcagagtccttttttgcgttctttaagataggcgtccggacaagtatccacggcgattttctggtagcgttccgcaatcttcagaccgaaattgcgggaaccggagtggatgcacaggaaagcgtgctctttcccttgcgctatttcaatgaagtggttgcctcctcccagagaccctacggagcggcggtgcctgtctttgtccgttctcagcacgtccatgcagatgcgggagatttcttcatccagttccgggtcgtccagcaaggcttgatgaacggagggacgggcatgcatcccggacgggacgcgctcgcgcaggcgtgcgtcaaagctggaaaaatccggcagtccggacagtctggcggtaagcactccgcagccgatatccacgccgatcaggttgggaattaccttatccgttttcaattccgccgtgaacccgatgacgcagccggctccggcgtgcacgtccggcatgatgcgcacccggcttccttcaaaggcggggtggttgcagacgtccctgatctgggtgcgggccaggtcttccagttcatccgtgaacacgcgggcttccgtgtattttccgtcaatggtgatcatggttttattcttttggttgaggggcgcggagatatgcggaaagcgccttcgcgccctgtgaccttgtcaccataacgcatttgttgactcttgcattatataagtattcatattatataactataaagttatgtttgagcatcttttcgcagaacggggactgtccctggaccgattgaaaaccttgatagaagtggccaaggccgggagcattgccgctgccgcccggggggatagtgcgcggcagagcctgtattcccggcagattaaggaattggaggaattcttcggtgtggaactggcgagccgccgcgggaaagtgctggctcttaccggagccgggtgggagctggtgaggctggccagtgaaagcctgtgcctgctggatgattttaaaagccggagccggaatctgccctaccggttcactatcggagccggggacagcctgcatgcttgggtggtggctcccgtgctggcgagtatccagaaacgggggctgccgtggcttttcgcgctggagaacctccgcaacagtgagattccctctaagctccagaatatggatatagacttcggtattgtgcgtaccagcgcgctggaggcggaagggttggaaagccgggtcatttgctccatggattatgcgctgtacgttcctgcagccctggccgggaaaaaggcgcgggggaagaaggaggattttctccgcctgctggaaatgttccccctagcaacgctggggagcggttccgggtttcatgcgttgctgaaaaggaattgcgctgagttcggcatcaggctgcgggtgcactgtgaaacgcaatcttttccttttgcggcccgcatgttgaagagcggagcgttcatggcaatcctgccctgcatggcggaaaaagaactgggggaagggtttgtcaaggttactcatccggcgctggacgggctgtcccgcagtatttccctggcctggaatccgcggttgctgcgcgtgaggccttcagccaaacgggtaattgatgttttttccatcccggaacgggagtgatggaaggaaaatcaatcagaatccacgcccaatttatttttacggtagtggtccagggagatgcggtaaaaatatacgatcgccagcaaattcagcagggctcccgttccgaaggcccagttcaggttcaggtacgcgtaaattttgcctcccaggaacatgcctgttcccaccccgatgtcaaaagcggtgaaaaatgtggaattgacggctccccggtggccgcggtccgccatgttcagtttcatggtttggaacgtggggatgaaaatgccgaagccaaagccgatgaggatggcggaagcgtaatagatccattccagcggcgccagcgccagtgcgccgaaactgacggtcaggatactcagggagatgacggaaagctccgccacgcgtccgcggtcgatttgcctgcctaccatgaacctggagaccagcatgcccagccccatcagcgcgtaaaacagcccggcgtatttgaacccgtgcatttctccgtacagggcggaatacacggccaccacgccataggagaaggtggcgatcatcacgttcaccgccagcggaatgcccacgcgcagcaccagacggtccagtacctttttaggcgtttcatacacgggctcctgaacagggctcccgggaacgcggatgagagatgcaatgcccgccccggccaggcacaggagcagggaactccaggtaatcacgtaaaagccgtactgctggtatacctgaaggccgatgacggggcccaggcacatgcccagcgtcattgtcatgccgaagaagcccaggccttccccgcggcgggcaggggggatgatatctactgccattgtcgggccggaggtggtcatgcctccccagatcaggccctgtatgaagcgcgtcaggaaaaacgccagggcggtggcggccgcagcataccctgaaaaggacagggccagcataatgtaaaccgtgatgtaaatcttcttgcggtctccggtatccacccggtgtgcgaaccaggggcgggagataatggcggccagaacataaatggacataatccagcccagccagccggaggagacctgcaattgccccgtcagatacagcgggagaacgggcaccagttcatagaaggccagccccgtcattaagttggcgcaacaggccaggatgtagtctcgcgtccagagaggcgctttgacggatggtgcggtttccgccgccaattcatctcttgtccgagtcatgcaggggttgtacagccgttgggaaaagtttcaaacggcctgacgtgtcatgatgaggatgagcggagggaggaaggccctgatgaatccttgttgggagacgttattcattttcacgggaaaaggttacgcccaccagcgtgtctctcccgtcaatggcattcagatagtcgaatacttctccgcagggtgtttcgttctcaatgaggaaaatgaatgctctgcgctggttgatatgttcatttgccatattggcgaaagcctgaaggtcgtttttccgggatggaccggatggttttttctggatacgccagtaaacaagctggtagttccctctttccgggtaaggggaccggatgaatttcacgatgggataaacgggtttccgggaaggtgttttgttgaaaacaagaaagtcatcttcacggaaaggatgttccagaacggcatcgtcgggaaggcagggaatgtccgggttcatgcctttttcagattctggatcagattccggggccatatccgtggagacgggaagatcccagcaaattccattttcaaaggcggacgcgatggcatcccctcttttcaaacggagattattcacgccatgcgcataagcctccgatatgccctcagcgatgcggaaccagggaagggacggattgtccagattgatggtcaggcatctttcacaggccgaatccgtcttccattcctgtatggggccgggcagttccgatgcgttcacgattatttctccgggcagcaaggcgctttcctttttagagcatgccccgaagaggaagctgatgaagagagggaggaaaacggcaggaagacgaagcatttattcattcttcttatatagtttttattgcatgtcaaaagaatagagagtgcggtacatgccgggaaagatggcgctggctcccgctccggaatatgccttcttttttgcgtgcaggacggcgcgggcatggtagggtacatggtatgagcgtaatcaccaagcgtggagacagcggagaaacggacctgatgttcggcaggcgtagtcccaagacagcgccgcgcattgaagcttacggaacggtggatgaattaaattccctgattggcgtggtgcgccattccggggtaagctcccggacggtggagatgctggacggcgtccaggctcgcctggtgggtgccatgggggaactggccacgatggaggaggatttgcccaaatatgacgccaaggggtacgcccgcattaaagcggaggatgtggcatggctggaggaacaggcccatttgctggaaaaggaatgcgacatccgtttcaaaggctgggcccgcccgggcaaggaaggatcgctgggctccgcgtatttggacctggcccgttccgtctgccgccgtgcggaacgccgtgtggtggcattgaggctggatcatgccctgagcaacgtgaacacggccctgttcctgaaccgcctttccgatctctgctgggtgctggcccgttttgaggcgctggccgcaggggaaaagatccaggcctgagcaggccgtttccgcccgtcctcctgttccggcatgttgcgtatctgcgcgattcccgtgtcaggagaagcctggaaagaatggttttgccgcagatccatgtccaggtggcaattccccggaatggttcttcgttattttcaggggagggcttcccgatcagtccagcggcaggatggaagtaaccagcattttgaaccgttcccgggcaatgacggaatgaggcactccggcgggaatcaggaggctctttccctggggcagaataacttcttcattgcccacggtgaagtacgccgtcccgtccagaatctgtatcagtgcaggaccgggcgtctggtgagtgggaaggagctgttcgttgtcaaaggccagaatggtcatgttgactcctttggagcgaataagggccagactggtgatttgcccttcgcggtaatcggtcagatcggcgtaattaaagggagtgcgttcggggaggcgctgaatggctgtcatgtaaattggacacccttgttggcccttcccgtttcttcatgacaggcttccgggaaaaaggtccgctccagacccgggagcggaccttggcattcagcattcatatggtgcttacttacggagtcagcgtcctgaattcataggcgtgaggtcggattcacaagtaaacaacagttattctatacatgaaaaatacaatttacttcaagaaaaattgtgtaggataatgcagatttggttctgctgcagggagaatcggatttgactcccgtatgggattgtttccatatacgggcgtatgctgtcagcggttccgccgcccgtggccggatgtgcccttctcctgtttggcggggaaggccgtttttcccgtttgccgcggtttctcccgtgagacgatggcgaaatccgcccactgctgctccctgtccactttcacgggaatgacgggaacgcgcagcccagcgcacagcacggaaccatggtcgttcttccagcggctggcgaacgcctcatacacccagcggccgccgggaagcttgtccggcttgaccagccccttaatctggaggcgcggtatttccagcagcacgccgaagtggcgcgtttccgtaaccagagcttcgtgcacttccggatgctccgtgtagcactggccttccagccattcgaagagtttcatccggttcgcgtccttttccgcgctggcggaaatgcgttccgtctctgaaatgtgttccgcgtcttcctccagcctgcctgcgctgcctgctcctttggatcctttgggaggattagccagcaggggattcagggagcggtgaaccaccaggtccgcgtaacggcggatggggctggtaaaatggcagtaattgggagtggccaggccgtagtggcccaggggctccgtgtcgtacctggccctcatcaggcttttcaggagcgccagcttaagtaattgctcgtccggggaacccttgatggacttcatcagttcattcaggtactggcgttgtccgatatcgtggacgggatgcccgtataatttgcacaactggccgaattcaaacagtttggaggaatccggctcttcgtggacacggtagatggtgggacggttcccgtttttcagggccagggccacggcttcgttggcggccagcatgcactcctcaataagctggtggctttcatcgtactcttccgtgatgatgcccgtcacgcggccgtccttgtccataacggctctcacttccgggaagtccagatccagggctcccttggcgtagcggttgcggcgcaggatggaggccagattccaggcttcccgcaccgtggagggaacttcccccttgtcgtttcccttcagcatggcgaaggcctcctgataggtcaggcgcgccttgctgcggatgaaagcgtccgcaaagcgtgcacggagcatcttccccttttgatcaaatttcatttcgcatacttttgtcaggcgcacgacatccggccgcaggctgcacaaatcgtcggaaaggcggggcgggagcattggaaggacgcggtccggcaggtacgtggaattgccgcggcgcagggcttccccatccaacgcgccgccgggcctgacgaaatgggagacatccgcaatgtgaacggccagcgtccagccggacggagtggccgtgatggaaatggcgtcgtcaaaatcccgggcgcttgccgggtcaatggtgatgacggtacggtccgtccagttttcccggcgggcgagttccccgggggaagggttttgaggcagcgtttccagttcccggagcacggaggcgggaaattccgcggaaaggccatattttctgataacggcttccatgtccacgtggggctcgtccggatagccgagcacctccacgattttcccgcgcggggctttcttttcctcaccgcaggttacgggttccacggaaaccagttggccgggaagcacctccatggcgggtttttccgccagttcaatggatgacggagagcttacgccgtctcccagcacgcggcccggcttgttctttccggtgcggaagacgccaagccagcgggagcgcgcgcgttccgtcacttcctccacgcgggctttcatgccggcatccggggaagaaaagcggtccctgcggatattcctccggcccctggccgccttgcgttccacgcgcacggccacccggtccccgtccagggcagtacccagacggttgggtttaagttccagctccggaatggcttccgtgtcccatcccagggccgcagcggcgggatccccttttctggggagaaaaagaatcttgccggagcgcaggatgcggatcatgccatgcaccaggttccggcgttcccgctttaaagcgtatctgcccttttgtagccgcacgagttttccttcctcctccatctggtccaccagggcgcggaaatccagcttctgccgggaatccacgttcagggcgcgggccagttcggatttgctctggggttcgtaacgtccgtcttccatgtgacggatcaggcggtctttaagggaatgattcattttgcggaagttccgggaaaaggtgtctcccattcccatgggaaccatcatagggcggtttgcgcgccgcttcaaggcgcgggcggtgcatgccgcgttcgtcagcggtttttggcctgctgccgggcatgccgttgtgcgggaccgcagtccgtctaggaatttttttaattatgtggcatatggattgacaatgatctgttttttggatttaacgatgtttggtcgtttttttatgaaaacatttattttcccgtttttggcctgctgtttcctggcgttcaacgcgctggcgtccaagggcgttgaaatacggcataaaacccagttctgcgcggcggaagtatatttcaggtatccagatcgcaaccctccccaggaggagatagacaaaagcaacagagaaagaacgaccgtcaccctccgggaatacatcaccctgaccgccacgctggacggcaaaaaacttcccaaaggcacccggtgtgactggtccgccgtggaaggaggggaatatttcaagcttgatagtatagataataaaccggatcaagtcatcgtcaacatcaataccctggccaaagcgcggcagacgctcaaggtgaaagctgaggtggacggggtggagcaggtggtggaattcaccctcatcccgccccaggggctgatgtacgcgggggcggagagccctttccggcaggcggaggaagaagcggccaaggtgggatgcaccgcggggctgagcgccctccgcatcctgcgcgtgtatcccttgaacatcagcttcaccaatctttactccctggagcagcatgccggttatgagcccgaccctcttccggaccatcccctggtcagcgagcatgcgcctttgccggagcccgcacgggtttccgtcaccaatgaagtctatgacagcaccaactgcctgtatccgccggcgctcattgacgcattctcggggtccatcggctggacgtggaagtgccgctggcagatattcggatgcacggataaaccccaaggcggcaggtacacgaaagaaaaagtgctctgggatttcaacacggatcaggttttctccatcaggcgcgatcccgatacgggaacggtgcactaccggatccagaagttcaagggattgaacaaaaatgacccgggcatcgtcaccgcaacaagcaactgattttctttatgaactattacctttccctctgtctttccgtgtttctcttcttttccgtcgggggccgcgcggatgaagccgctgtgtacgacgatttgccctccttcatggacatccggattgaacggcttagcggggacgcgcggcatctgaagggcctgctggaccaggggaagctgggcgacttttaccagcaggcgctgcccgtgctcaacagggagctgtttgacgaggacggcggaatgaccccggaggagctggaaaacgccctgttcatcaacaacatggtcgtcaaggccccctatcaggactaccggctggacaacttttccatctggatcaacggaagtgagctggaaaccaaatttaaagcatgttgtaatctttccaaaattcaaacctatgtcagggagaacaagaggctcaggcaagggaaggagctcgcgaggttctgcctggaggcggagttcgaatatatcaggcggatgatgcttcagggcgccgccgtttaccgctacatcgccgggctggaggcggagcacgggaagttccatcccgtgaggccggtcgacacgctgccctactggcgctaccgggagacgaaaaacctcgccgcctgcggtgcggaagaggaacggcgcaggaaggccctgtacgagcggaacgtggacgaactggtccgcctccggcagtccttccgctggtatattgagaacagcgagggtgtcctgttgaatatcgttctggagcttcaccccgggaataggggccgcgcgctggaaaggctgagggaatgcggctacaagacggaccgggagctggtggagtttctggaaaggaccgggggtatggacaaggacacccgtttcctgtactctcccgggatgctccgggaacacagaaaactcgggaagggggattaaccgccatggccgcgaatatcctgtcggggatggttcccctcagcctttccttcttcctgctcttttctctggggagccgcgcggatgaagctgctgtgtacgacgatttgccctccttcatggacatccggattgaacggctgagcggggacgcgcggcatctgaaagacctgctggatcaggggaagctgggcgacttttaccagcaggcgctgcccgtgctcaacagggagctgtttgacgaggacggcggaatgaccccggaagagctggaaaacgccctgttcatcaacaacatggtcgtcaaggccccctatcaggactaccggctggacaacttttccatttggatcaacggaagtgagctggaaaccaaatttaaggcatatacgaatctttccaaaattcaaacctatgtcagggagaacaagaggctcaggcatggaaaggaattcgcgaggttctgcctggaggcggagttcgaatatatcaggcggatgatgcttcagggtgccgccgtttaccgctacatcgccgggctggaggcggagcacgggaagttccatcccgtgaggccggtcgacacgctgccctactggcgttaccgggagacgaaaaacctcgctgcctgcggtgcggaagaggaacggcgcaggaaggccctgtacgagcggaacgtggacgagctggtccgcctccggcagtccttccgctggtatattaaacacagggagggtgcactgttgaatatcgttctgaagcttcaccccgggaaccggagccgcgcgctggaaaggctgagggaatgcggctacaagacggaccgggagctggtggagtttctggagaggaccggaggcatgagaaagagagttcaattcctgtactctcccgggatgctccgggaacacagaaaactcgggaaggaggattagccgccatggccgcgaatatcctgctgagaatgctgttgtgctgcgtcctgttactggtatctggcgtttcccgggcccgggatgccaccgccgtggagagtttgctgagggcggattattcttcagtcatcattgacggcgtacggaatcaactccggaaacatcttgattccggtactctttcaccggaaaaaatccggcggatagtacatcatccggaattggagcaactgtgccatatcggacaatttttccgttatgccagccaggaaaaggcgttttcaacaagagagctccgggaccggacgtttaccaggtggcttgtctcccatccggaagttttccggaaactggcccatgcagggtatgctcagcagagcagtctggctattctttaccgtctgtggaatagcgcagacagggacttgtgcggagttgaccttaacatcgccctgggggcctgtctcatcgccgatgttttcacggcagaggaatgtatagccaggtatggattttaccatgattcccatcatcatggcaggtgttatccgcaggccgacagccttgaaccgtgggagtgggccgtggttctgagaggaaaagagagtctggaagatctggcatgggcccagcaatttattgaagggaaaaatatcaaacccgagcaggcagggggtaaatttaccggatttattccctaccgtaaaaagaatcacagaggaatcagcatccatgccggggccgcgttttacgataacaagcccatcactcttcagctttatacggaatatggaggcgtgtgcggagccgtttccaagggggccgcgggttttttaagagccaaaggcgtcccggcgtaccccatcgggcagccggggcattgcgcttttatttggaagcaccccaaagggcaatggctgatcggcaacaacattggaggatggaactgggccaatggtggaaataaactgccgtggaaaggccccgtgcagattatctccgccctctgcgctttctggcagggtccccaggcccgtgaatcttccttgatgtacgatttatctttttattcccggaatccgcagcatgtggaactgctgcttcaggaggcgtgccgggccaatccttacaattatccggcctgggcgcgttatttgggcatcaaggcgggaggtgcgggcgataagaagaagctggagtacctcatccagttcagcaaggcgatgccccatgaacataacctgattgattacgtggcgggtcatgttttgaagattaaccctgaaaaggtgaatccctatgaattgtacgcctgcggggtcagcccggacagtacgcccgaagcagaggaacttttcatccggcaattttggaaaaagctgattgccgactgccctgaggttaaactccatgctgtttacaaggaagggactaccggtaatttcttaaatttatggctggaaaaatcaaaaaatgtcaaatggaattccaaaatgaagagcaaaaccagcaaagcttttcaacaggcgttgctggttttgaccggcaaggaaaaaacttgcattaaaatgatgaaaagctaccgccggtttctcatcatgtggaatgatgagaaatatatgatgcaggcgcatgaatttgtgcaggaccatttaaaaggcattaccagcgaccaggtgaaaaaggaaatggccggcatgggtagaaaaatgggtatccttttaaagaatgataaaatattgaacatgtatggtcaaaaccgggaatccgaatagggattgaccattgttcaaagggacattatctgggccggagcgtaccttccgtggtgccgagctgttccgcgacatccagttcccggatgagccgggccgccgtgcaggagccgtccagcaattcccggtagcgggacaccagaaggcgtattttttccgggggatcatccagcagttccagacggaagcgggaaagacccaggcggcggaagccccggaggaagccggctcccgtctgagcgcgtccgttgaacagcgtgttccggcacccggcgtccgccagcaggggatgaagctggcctacgcggtcacgcagctgcacatgatgccgttcgcaggggcgtccgcaattcttataactggtgccgtccgacaggaaggtgcagaacacgcaatgctccatgtgaaacatgggcatatgctgatgcagagtcagttcaaaccattccggcggcgcggcgcggagcaggtccgccacctgttccgcgttcaggtcgtaagagagggtgagatattccagcctcccccgttctttcaggatagccgcgctatacggattggcgacattcagggaaaaatccccaatgcggcgcaggggggaatggcggaagtattgcgccgcgcccaggttgcggatgaggatgccgtccggctccgcccgttccatgagcttaaagtaaccggtttcagacggcttctggatgcggggcgtcgccagaaagacggggatgctgtccgcgtgctgccgaaccgctttcactcccgccgcatagtcccggaggtcttcaaagtccagataaacggcatccgccccggcatccagaacggaaggtatctgttccggtctgcggcacagcacagacaggtgcggcggcgcgtccggagctgccgcccccgccggaagcgcggaaggggtgaaagccgcggaaagatgggagggaacgggggcttccctctcctgccggaccgtttgaatttgttccacgagggcgcgccttgcctggttgaggatgctgagcgggagcatcaacccgttcggcagccggcattcgcagtaagccaggcggaaccccgttcctcccagtctgccaagctgctgtttcagcgcttcaggagtcagcgggcgtttttccgccgtttgcaggggctgtgcggactgcacggaacacccgtattccgggcaggaaaccgtcagaggctccccggcggatccggtgcatgtcaaatggaggggtacggaggcttccagcaggtgttcccgcatttttttcaactccgcgttcagggccggatcatccgttttccagagcttctgccccggcctgaccctgctccagtcaatgcgggatgcttttccatgaaagaaaaggcggtttctctgcactttccagatacgaccgccctgttcttcattgcggtcttcccctgcatcaatgacgaagccgtcaccgggcgcgagcggaatgcctccttccggtctgatatccagccagccctgaccgctgttcatgatgacgcctgcgtaagcgcccctctttttaccgtagcggccgtgggtcagacgcgggtggtccgttccgtccagccagcctgtggagaagccgcgtgaaaataccatttgcagtgcgtagcggtcgcgtacggtcaccatttcatccacaggtattccagcgcaggcggcgtccagggcttttctataggccgccgtcaccgccgcaacgtattccgggcttttcaggcgaccctctatcttatagctttttacgcccatgcggaccaggtccgggatgcggtcaatggcgcacaggtcctgggggctgagcaggtagcgccgttctcccaggggaacggctttgccgtctacaaccagggaatagggcaggcggcaggcctgcgcgcattcccccctgttggcgctgcgctggcccaggctttccgatgtaaggcactggccggagtaggccacgcagagcgccccgtgaacaaatacttccaggggtatgtccgtatgccgtacgcattgcccgatttccttcaggctcagttcccgggccaggacggcctgcttcaggtccaggaatccggaggcgaattccagcccgtccggagaggaaagcgtcatctgggtggaggcgtgcagttccagcttcatgccgggaacctgccttccccattccgtcaggcagcgggcaagtccgatgtcctgcacgatgaccccgtccgcgccggcggcattcaggtggcccaggtaggagagggcgtccgccagctcggaggtgaaaatgagcgtattcatggtcacgtaccccttcacgccgtgcgcgtgaaggaaacgcatcagttccggaagggaatccagcgtgaagttgtttgcgcgcagacgggcgttgaaacggtccagaccgaaataaatggcgtctgcgccattggctacggcggcgcgggcgcagtccatgtccccggcgggagccagcagttcgggacgcaggtctccgggccggagggcggaaagggtcatgtcgtcggaagtcacggggaaaagcaaaaaggctgtaggggttattgggcggtgctgcgtttttccgcatgacggagcaatgctttcaaatctcccagaaggaacagggaacctgccgccagagcggggaacggggaagccagcgccgcctgcagcccgtccggaagcgtggaatgaatgaaaacggggccggtttcctgcccggccagcagggcagccatttcttgcgccggcatgatgcggggggaagtgcagggaaccaggtgccattctccggcaatttcccgcaaaaccggaatcatttcccggatatgcttgtctgcggatgcggcaaaaaccagcgccgccttccgtcccgggaattcctctttccacgtggccgcgagcacgcgcgccgcatgttcgttatgagcgccgtccagtaccagagggggcgtctcaaggcgttcgaaccgtccgggccactgtaccctggccagggcagcggcggctgcggcaggggagggaagggcatggagccgtctcatggtttccagcgccagggctgcgttttcccgctgatgggctccgggcaggcatgggcggggcgtgttccggtccgcccgggcaatcgtgaggggagaacggcggttccgcgccgttcgttcgatgacggccatgacacccgggtgctgcacggcagttacggacggttttccgggggcgatgatggccgctttttccgcagcgatctcttccagggtatctcccagatactgctggtggtccagaccgatgggggccagtacggcgatatccttgggcacggcgttagtggcgtccagccttccgcccagccctgtttccagaatgatgaagttcacgctgtttttccggaagtggcgcagggcgacggccagagccagctcgaaaaaggtgggcggctgttcccagccttccgccagctgtttcaggaaggaaatttcttctgccagggcatccggagtgatcatgtctccattgacgcggatgcgttcagaaaaatctaccagatggggggaagtgaacaggcccgtgacataaccctgcgccctggccagggcctcaatcatggcgcaggtggagcctttcccattggtgccggccacatggaccacggtggcgttgatacggtccgccccggctgccgccaacagtttttctgtgttgtcaagccccagcttgatcccgaaaaattgggtggaaaagagccagtcaagggcggcggatacgttcatgggcggtattttaccacgggaaaactcccgttcaactccggtatggcgtggggagctgtaaaatgccgccgggaacggacgcggcaaacacgaacaagctaccgttgctacctctcggtcctggcggggtttgccagtcgtgcctccacggggttcccggcggcccacccagtaaactaggtttgcagtgcagtgtcaaccttcaaagacatcatctccttctggcgaaagagagcagaatggagatcaacaatattacgccgatgacggttgccgccgtgaagaagatttcttcttcctgtctgagccggctgcgctcctcttcgagtttcgcgtctctgacgcgttgcagcctgtgcagggctttggcctgttcctccacatccgcctccgttcgcatgacaatcgtttcctcatggctgacggcctggtcgtaaggagcaatcatcgtgcggaattcggggtcttccgaaagtatttccgtctcatcataatcttccgccagaggggagttcatggtgtcccgaagactggcgatctgcctgtccacattgttttggaacaggtccaactcccttttggccttttcgtaagcttccgtctggtcgcgcagagcggcttccccctggtcggtaatgcgctccagttcctgcggaagactggcctgaagtttgagcagatccgtcctgttctccgtcactttaaaattcctgtttttcgtgttggacgcctccgcgagctggatgcggttgatgtcctgacgggtttccacctggcgtatttgttcctgaagccggtttcgggcgctgtccaattgttgtctggtggcgtccctcctgcttttgagttcttccacttccgcaacgcgccggtcatattgttccagcagatgggctattcgggcttccgcgcttcgggcattgggctttccgcttacgggagagggcgtctttttcccgtctttttcctggccggcttgctttattcgggcatcccagtatttgcggacggcttcttccttccgttgaacagctttctggagacgcaccgcctgctgttcgtgaagttccgcggcttcatcaaaacgggcttgggccgcatccagctccgggcagggttcctgctccatggctttgagggcttcatgcctggttgcgaggccgttttgataataatcccagccgtagtatcccccggcgagcaacaggatgagaagtaggtaacgcatcaatgaaaaaaagggtagagtcagaagtaaatctcatagtgggagttccgccggattttgcaaactctaaaatcagccatccggagcttttcccctcaatagggagaatgatgataaattcactccggagggggcgtagttttccttgaagccatactttcaagccatgtctattttctcatcacgcagacaatttctcaaatctttggggcttgcggccggagcggctgccgccggaaatgccctccctgggaaggctgtggaaatccctgccggagaccatctctggaaatccgcctctccggcggctccgaggccttccggttccacatacatgggagggttcaaggctccccggctgggtcgcatcaggctggccttcatcggcgtgggagggcgcgggttctcccacctggcgcaaatgtgcgtgatggatggagtggaaatcgtgggcatatgtgatttgaaggaagagttgacgaaacgcggcgtggatcgcgtgctctccagaatggggaaaagccctttgggctattccggcggcgatatggaatacctgaccatgctgaaggagctgaagccggatgccgtcatcatcagtacggattggagttcgcatgccagaatcgcctgcgacagcatgaagcacggcgctcacgcctttgtggaagttcctctggccgtctctctggaggagctctggagcctggtggataccagcgaggccaccaggaaacattgcatgatgatggaaaacgtcaactatgggcgggatgaactcatgttcctgaacatggtccggcagggcgtcatcggcgatttgcttcacggggaggccgcgtatatccattgcctggtgacgcagctgggggacacgcgcggggaaggggcctggcggccggaatatcataccagaatcaatggcaacctgtaccccacccacgggttggggccggtggctcaatatatgaatttggagcgtggagaggaccgtttctgccgtgtggcggcgttcgcttctcctgctctcgggcgcaatgcctacgctaaaaagcatcttcccgccgatcaccgctggaacaatactccattcatctgcggtgacatgaatacggctgttgtcaagacgcagctggggcggaccattcttgtccagctggatgagacgtccccccggccttactcccgcgccaacctgatccagggaacggagggcacgctggctggtttcccaacccgcgtggcgggtgaaaagctgggcaacggcaattatcatgaatggattgaaggcagggaaaaactggccgctatttatgaaaaatacgatcatcccctctggaaacgcatcggggagctggccacgaaaatgggcggtcacggcggtatggactttgtgatgctttcccgcatcgtggaatgcctccggaacggagaaccaatggatcagaacgtttacgaaggagcttcctggtcttccctgctgccgttgacagcccgttccatcgcccagggcgggatgcctgtggaatttccggattttacccgcggagactggaaaaccaccatgccgctggccgtggtttcatgaataacgccggggatgaaggggcgctgccctcttccggagagttcaggaaagaatccgttcttacgcagggtgctcagcagggactgccggaaaacagattatttaattcttccgcgctcatgttcatgagccattgttcggggcctccggagaacaggtcgtccgccatgcggcgcttgtccttgagcatggcgtcaatgcggtcctcaatggtgccccggcagatcaggcggtgcacgagtacgttccggtgctgcccgatgcggtaggcccggtccgtggcctggttttctacagcggggttccaccagcggtccacatggatgacgtgggatgcctgggtcagcgtcaggccggttccggcggctttcagggacaggatgcagaagggagggccggattccttctggaaggcggtgacgatgttctggcgttccggaataggcgttcccccgtgcagggtaagcccggaacggccgaagactccggacaggagatcgtgcagatggggaatgatggagcggaactgggtaaagagaatggttttttcctgcctggcggcaatggaggcgcacagttcctgaagccgccggaactttccggagcgttccggcgcataatcgtccgtgccctggaactgggcggggtggttgcagatctgcttgaggcgtgccagaatgggtaaaatcagcatcaggcgggcagctgggtccggttcgtccagtacggcatgcagcatgtctatctgtgcttggtacaaggcggcctgttccggcgtgagggagcaataggccggtatttccattttgtccggcaggtcgggaaccagcgccggatccgttttcattctgcgcaggatgaaggggcgcaccaggcgtcgcagcggggcataaccgcgttccagggaacgggtgaaggattcgaagctttttctgctgcccagcagccccggattcagaaattccatcaggctccagagttcattcaggttattttccaccggcgtgccggacagggctatgcgtcgttccccatgcagggaacggatggcgcgggaacgggcggagcctgcgtttttaatagcctgggcttcatccagaataatggccgggaaatgcaggtcggccagggcggacgtgcgtgcagccatgccatacgtagtgatgacggcgtggcagtctttccggcgcagggtattttccggctgccacgggtccggggaggaagggtgcatgatgcgcaggataagctccggagcgaagcgttgcgcttcctctttccagttggacaggagggaggccggagccacaatcagagccggcagaccctccagccggccttttctccgcaatgcgtccagccacgcaatagcctgaagggtttttcccagccccatatcatcagccaggcaggcgccgaaaccccgttccgtaatccggtaaaggaaagagaacccttctttctggtaagggcgcatcagggcgtccagccgggaaggaagctccggtatggagactgggactttccccgccaggatgtccagggtctgccggaggttttgtcccggttccatgacacagtcttcgtccggttccggaatctgtacaagctggccggaagggccgttaaccagcattctcagaccctggaccagagggatgccgagggagctcatcatacgtgccgcttgagtccaccggtccattaagtcccggaccttccgggcgtccacacacacccattcccccttgaagcggatcaggccgtctccgttgctgagcagttcccccagctcctccggggtcaggtctttgcctcccagagtggcggatacggaaaatttcagcagcctgcggacggaaagcccggaagaatggaccgttgtttcacttccggatgcgtctgccgtaacttttacctgtagtttgggaggggtttttttccatagattcaccatgcgcacaatgatgcctgcgcgttcgtagaccggcgtgtcctgcagaaaatcccgggcctccggagcgctccaggccatcggcgtataaatttttcccgttatccagcaggcgcttcagcagggggctttcgcgtgccgcttcttttaaaggctggagtaaggccagcagggcggtgtaattcccttcatgaagtttcagggcggtggcaagggggaggtggcgtacctggttgtccgcagcgctttgatgcgcaaaggtagccatgaaagcaaaggggcgggagcctgtggcgtcatcccggttttccgcaaggtggaaaaataccttgcctatctggttccagggcgcgcccaggctattcaaccattcggcgggggtaatgcctcggacgcggatttcctttgctattgccttccgcaaatcttcaaaccatccggcaatgatgtccggagtggcatattccgcgcccggtacggggggaaattgctccgccagaaaggctttttccgtagcggaggccagcaggtggtccagaacggtatccacctcgtccggcctttctgcggcagcgtgcgccatgcgggtaagcgcctggcgcgccatgttcttgataaagaaggcgcccggatccggaacggtttcccagttggataccgccagggcatacagcccgtttccggttccttcttcaaacagacggtcgaaaggcggtgtgtccgtcaccaaagcaccggaggggaggatgcggaaaccattgatattccgtttctcttccggtactgcatgatagggatccggctgcatggctggcgggaatgtagcgtgtgcttgcggccgtagttcacagggcgaacgtcgtatctctgatgatgggcagcttggacggcggaggattgagcagcttcttgatttgtttcaggtaatcaatcagggctttgcggacatctattcccgtcggtttgccgtttccccgttggggaaatatgaaattgctgcacaggtagtctcccatcgcgacagtataaatgaccccgtttttcaaagtgctggtaatgctgggcgtaacaccgtccatgatctggtaggagaatccggagcagtacacttccagaatacctccttcgtcatcggtcggagacatgaatttggacaggatcagttgctcaatgtccgctttactcatggagcaggtgacgatcttttcccggaagggttccagctcgtaaatgtccctgatggtaacgggtcctttgttaagatggtttttggaccgtactccgccgcggttgtaaatggcaatgtccgaatgggaggcctgctgaatggccttgcagaaaagggtgcctatggtgacgtgcgtgatttcttctccggcgacgcccacctgctggttgaaaagcggatttccggaaaaccggcggacaatttcctttacttccgggtcattgggaatttcctcattcaaagaaacggccctggtggatttggaaaggatggagacgggatgttccgtggagaagatgatttccgtaactcctacgtggctcaaactatgtcccgtgtggctgagcagcgtgcctgttctgagatgaccgctgggaagcatgacatgggtatggcctccgagaatgacgtcgatattcggcgaatacttcatcattttcagatcattgccgtatcccagatggctgaggatgacgttaatggtgttgtggtgaagccggaacctgtccgtgatgcccttgtaatcttcttcatccggcagcgtccatgagatgccggccatcttcctcacatccgtggtttgaaggtccgccagacctatgaaccctacggaaacggacgtgccttcaatcgggatgctgacatacggagaaaaacagttttccagagtaggggaaaggctggcgttggtaatgacaaacttggtggagggcattcccttgatatggtcgcgcagggcctcctgcccgtaatccagatcatggtttccgatggtcactacatcataccccagcttgttcatcaggatggtaaggggttctccccgtttttcacagtcgtccacatagggattacctatgaaataatcacctgaatccaccagcagcacgtgcggatatttagcgcggtattgctttaccagtgtggccagtcttgggaaattgtccagattgccgtggatatcgctggtagaaatgataatcagcgttttatcgggatccgatttaggctcctgagccagagagaacgggcacaggcatgccagggaggtaagaacaatgcggagcggaatcatgcagggtaaaatgataaatatacggaaaaggatgagatgggattaacgggcggaaacctcatgcgggccgtcacccacggagatgacttccagacggaccctggatacgccgcgtctatgcaggccgatgcggcttgcggcggcggtggtgaggtctatcaggcggttgctgtgaaaaggcccgcggttattgattctgacgacggttgatttgccggtttccaggcaggtgactttcaccttgcacggcatcggcagggttttgtgggccgccgtcatggaacgctggggattgatgtactctccggaagatgtcttcaggcggcgcgctttgccgccataccaggaggcatagccggtctcatggtattgcagggcatccgccacgctcatgggagtatacctttttccacgtacccggtagggcgcatttttgacatgcgcctctgcctcctgaacggacggctccgttttctgagcgcacttctccgtagtggagcagcccggcatcagaaaaaacagcaggacggggaagaaccatttcacgctttttacgtttaacacatattgatgattttgtataacaaaaaaggaacaagagttgaaatttaaggaatagagcagggcggaacaatcttttcccggttgcggtttaccagttgagcggctcggaaaaatgcagtatgatctcccgcatgaattcttccaaggtaatcggcctggtcgctctggcggaaaaaccggggctgggggaagcgttgcgcatcatgcgccgggagctttcccgccacgggctgggctcctgcgtcattgaaacgccggatgctctggaacgggctatcggacggtgcggcatgctggtgaccttcggaggggacggcaccatgctgaccgtctcttccctggcggccatgcaccgcgttcccctggcgggagtgaacctgggccggctggggttcatgaccacctgttccgtgcaggaactgccgcttctggcgtatgcccttcaggaaggttcctacctgacggatgaacgttccatgcttgaagtggtccgggtggggggagacggcgttgcggcacctccccgcaagctggccttgaatgaagtttccctgatccgcgcccagtccggcaagatggtggacctggatgcggagatagacggagaattgctgaaccgctaccatgcggacggcgttctggtttccacccccaccggctccacggcatactccctttccgccggggggcctctggtctggcccatgtcccgtgtcgtatgcgtcacccccatctgcccgcacagcctgaccaatcgttccgtggtgcttcctgacaacatgaccatacgcctgcggccccgcgagcgccgcggccgctttgactccatggtctattccctggacggccgttccgcctatcccatcgaagtgggagaaagcctggtaatccggaaggcgccggaaacgctttccctggttcatctccggaagcaaaatttcggcgccctgctgagggccaagctgcggtggcagggggcggaaatcccctcggacgacgaataggccgttgcggaggcccggcccccggcgggctgtcccctcactgcggaattcctgcatccgggaacggttttccatttatcgttccgcattggcgcaggggcggtaaaacgatttttttaggatgcgggcttgacgaaaaggcctatcctataatactcttcctgccctgccaccaagggggtggtagatcttaatcgcataaacgcgtaagaaatagtcatatatgaagacccacgtgaaaaaaggtgatgaagtggaaatcatcgccggacgtaaccacaagggcaagcgcggcaccgttctcgccgtgaatgcttccaaaggtactgtcatcgtagaaggcgcccgcaccctgaaaaaggctgtgcgcccgaccgaacagaacccggaaggcggcattcaggaaatcaacggcccgattcacatctccaacgtgaaaaaagtaggctaggccatccggtctgaccctgcgcttaagccatatcgatcattaataaagagctgacccgctaaaacaatgagtacaccaacactgcaaacatactaccgtgaaaaggtcgttcccggccttcaagcgaagcatgcatacaagaacgtgcatcagattccccgcctggagaagattgttgtcacctcctgcatgggcaagcacccggaccgcaagcaggccgtggaagatgccgttaatgaaatcgccaaaatcaccggacaaaagccctccgtcacctatgcccgcaagagcgtggccaacttcaaggtgcgtgaaggcgaacctctgggagcccgcgtaacgctgcgcggcgcccgcatgtgggaattcctggaccgcttcatcaatattacggctccgaacattcgcgacttccgcggtcttccctacaagtcctttgacggcaacgggaactatgccgtcggcatctccgaccagtccattttccccgaaatcgagcttgaccagatcaagcgtcagatcggcttcgatatcattttcgtgacttccgctcctacggacgatgaaggccgcgacctgcttcgcgccctgggcgtccccatgcgcgaaccgaagaaggccgaagaaacccaaaccgccaacgcctaactatttcttaccatggccgtattaagtgatcccatttccgacttcctcacccgcctgaaaaacgccagcctggccggcaacgaggaatttaccgctccctgctccaacatcaaggtggaaatcgcccggattctgcaggaagaaggctacatctggaactatgaagtgaccggagaaggctccaagaagcaaatcaaggtgaagatcaagtttaccccgcagggcaagccggtcgttaccgatgtgaagcgcagctccaagccgggccgccgccagtacgtttcttccgaggacattccccgcgttctcagcgggcttggcattgccatcgtctccacctcccgcggtgtgatgaccggtgcgcaggcgcgcaagcagagcattggcggcgaacttctcgcccttgtatggtaaccattaacatttcctaaacatatgtcccgagttggtaaaaaatccatcacattgccggacaaggtaacggtaaaggttaacggctcttccgttcaggtggaaggccccaaaggaaagctttcctggacgcttccggaaggcatcaccgctaccgttgaaggcaatcagctctccgttgaccgcgtcggcgaaagccgtcagcttcgcgccctgcacggtacgaaccgttccctgttgaacaacatggtcatcggcgtgtccgaaggcttcgtcaagaaccttgaaatcgtcggcgtcggtttccgcgccgccgtcaagggcaacatcctggatctgaacctgggcaaatcccatccgatcaaccaggtaatcccggaaggcctcaaggtaaccgtgactgaaaacacgaaagtgacggtcgaaggcatcgacaagcaggtcgtgggccagtttgccgctgaagtccgtgcgtactatcccccggaaccctacaagggcaagggtgtgcgtttcgtcggtgaagttatccgccgcaaggaaggcaagagcgtcggtaagtaattcaggtaataactattacaacatatttatacacgatgagtactatcaatcgcaaagccatccgcgccaaggttcgccgccgcatccgcagaaaggtttccggaacggcttcccgcccccgcctggctgtctatttctccaaccgccacgtctatgcccagatcatcgacgatacggtgggcaagactatctgctccgcttccacggccgatgcttccatcgccgatccttccaaactcgccaactgcgctaccgctaccaaggtgggcaatctgatcggcgaacgcgcgaaggctgccaatgtcactgaagtcgttttcgaccgcggtggattcaagttctgcggtaaggtgaaggccctggccgatgccgcccgcgaaaccggtttgaaattctaattgaaagattccctaaatgaataacgaaacggaaaacactgctcctgctacggaagccgccgctcccgctcaagcgcagcaacccgcaacgggcggccgcggaccccgcggaccccgccgtgacggccagaatggccgcggaccccgcggaccccgtcgtgacggacgccgtggccctcaggctgaagctcccgtggaagaaggcccccagctcgctgaaaaggttgtgttcatcaaccgttgcgccaaggtcgtcaagggcggccgccgcttctccttctccgccctcgtcgtgagcggagacatggaaggccgcgtaggcttcggcttcggcaaggccaatgaagtggcagacgccatccgcaaggctacggaagccgccaagcgccagcttcgcccggtctccatcgccaacggcacgattccgcatgaagtctactccgaattcggcggcggcaaggtgcttctgaagcccgcctcccccggtaccggcctgattgccggcaacaccatccgtgccgtgctggaagcagcgggcgtgcgtgacattgttgccaaatccctcggttcctccaaccacgccaacgtggtgaaggcaaccctgcaggctctcgcttccctgcgcacgagcgaccaggttcttgccgaccgcggcaagaagaaggaaaaggccatctaatctgatcaggaggcggcggcccggcgccgccgcctccacgaaatccaaccattgtaaataacatgttacagcttcatacgattaagcccaatcccggagccaagcaccgcaagaagcgcctcggcaacggggaaagctccggtctcggcaagacctgcggcaaaggcaacaaaggccagaaggcccgctccggcggcacgattcggccgggctttgaaggcggccagatgccccttcaccgccgtctgcccaagaaggggttcaacaatacccgcttccaggataaaatcctcattgtcaacctctcccagcttgaacgcgtgtttgaagccggcgctacggttgatgaaaacaccctgcgtgcagccaagctcgtccaaggtccctgcgacgccgtgaagcttctcggcaacggcaccctgaccaagaacctgaacgtagtcgtggacttcgtgagcgccagcgcccgcgagaaggtaacccaggccggtggcaccgtcaccgtgcttagcgaagcctaatcacatttggcgaaccgggtcatgcagcttgacccggttcgcatcattgtgtttactgttgcggttcccatggatgccccgggtgcaaaccgccgcgacatgcaagccaagctgcgcgccaacttttatattacaggaccatgatatccgcatttgcaaactccatgaaagtaccggagctcaggcgccggattttgttcacactggcgatgattgtcgtcgtccgcctgggggtacagattcccctgccgggcattgacgtcatggagctgcagaaagtgattgaagcctccgcgaacgccagcggtcccggagcgggtctggctaccgtgctgaccattttctccggcggcggcctccagcagtgcggcatttttgctctgggcatcatgccctacatttccgcttccatcatgacccagctcctttccgcggtggttccccagtgggccaagatggtgcgggaagaaggcggccgccagaaaatgaccaagtggacgcgcgccatcgccatcgtcattgcccttgtgcagggctggttcctggtcggcacgctggaacacccggaacgcctgcaggccgtgggtctcaacattcctgcggactgccagcttgtcattgaccccggcatccagttcgccctcatgacggtgctcattatggtggcgggcaccatgttcctgatgtggataggcgaccagattacggaacgcggcgtcggcaacggtgtttccctcatcatttccgtcaacattattcacgcccttccgggggcagtcaccctggcctggaaaaccctggtgtacaaggacggtacggttgtccccatgggagccatgctgctcgtggccctgattgctttcctgattgttgtggtggcgctcgtcgtgacggtgacgcaggcccagcggcgcattcccgtgcagtacgccaaacgggtcatgggcaataaaatgttcaacggcgccactcagtacctgcctctcaagcttaactactccggcgtgatgcccgtcattttcgctacggccatcctctcccttccgcaggtcctcttctcccagatcgcccattacaacaccacgctgcagtggatcgcgaccaagatgaatgactggctgaatcccgcttcttccggctattacattatttccggcctcatgattttcttcttctcctacttctgggtggcgaccatgttccagccctcccagatcgcggaagacctgaagcgcaacggcggctatattcccggcattcgtcccggcccccccaccgccctcttcctggaccagaccatgcaaaggctgacctttgccggttccgcattcctgaccctcatttacttcctgccttccctgctgaatatcggaggcaatatcccctacctggtcacccagttcttcggaggcaccagccttcttattctggtgggcgtactgcttgacatgatgcgccaggtggaaacgactcttctttcccgcaattacgacggtttcctgaaaaaaggcaaacttaagggcaaatacgggcacatccagggtaccggcgccgctgcgggcagccgcaccgttaccgtcatgtggattgttatcgccctgcttgtgctggccggagccatcgcctacaacgccatgcagtaagccccccttttttactgaaagtaaagatatgaaggaactcaagcatttcattctggttggggctcccgcatccggcaaagggacccagggccggtttctggctgataccttcggccttcactccctgagcaccggctccctgttgcggagggaagtggaatcctgcacggaactgggccggaaagccttgagctatatggacagggccatgctggttccggacgaaattgtcaacgacatggtgcgcggctggttgtcagagatggaccatggcgcgtggttgctggacggctatccccgcacggttgcgcaggcggaaacgctggaccattttctgaaccagcggggaacctctgtggacgtggtcgtctggatggatgtgtccagggagctcattgaacagcgcatcatgcgccgccgggaatgttccacatgcggttacgtggtgcagacgccggaagaggaatgttccaagtgcggcgggaaaatggtttcccgcaaggatgacaacatggaagctttcgcccgccgctggaaggattttgaagccatgacgctgcccgcagccaggtactacgaggcccgcggcctggtcgttaaaatgacggtgtccgaagaacgggaacctgccgaggtttcccgggatctggcccgcaagctggaagagtaccggcaatagaaagaataatcccatggcagaacgaatccatatcaagtctcccggcgaggtagccaagatgcagaaggccggggctgtaacggcggaaatcttgatggagatcggggccgaagtccaggtgggacgcactacgcgggaaatagatgatatcgcgcgtgaaatctttaaaaagcacaaggtaggcaattccttttaccaataccgcgggtttcccggccagctctgcatttccatcaatgaggaggtggtgcacggcagcgctggtccccgccgcattcagaacggggacattgtgagcctggacgtgggcgctgttgtggacggctggcatggagacaacgccatgaccgttccggtgggtatggtggatccggaaaaactgcggctgctggccgtgacggaggaatccctgttccgcgccattgaactggtaaggccgggcgctttgctggcggacgtctgcgcggcggtggaaggtttcgtgcgtccccgcggttttaccgtggttcgggattttgtggggcacggcataggccgccacctgcatgaagaaccccagattcccaattaccgcccccattacaagcttccgcgcctgaaaaaggggatggccctggctattgagccgatggtgaacgcgggcaggccttccgttaaaattctggatgacggctggacggtcgtcacggcggacggcaaaccttccgcccactttgagcacacggttatcgtaacggacggcgcgcccctgattgtgacggaccgcccccgcatcgcgttgccggaacagctcggcattgctcctttgtaacttcagccccctccagggaatgacgccgccggtatcttccgttcccgtgattctggagaagaccgccgcccgccggatggtgtgggtggatgtggcccgcgtggtcgcctgcatcctgattattgcgaatcacatggccttttattcggcggagctgtaccggtggatatgggcggagtttctggcggcgcgcacgcccttttttctgctggcggcgggctactttgtggggagaggctcgttcggtcctctggatggaggaagccttttcctctggaggcggagctggtttcttctccgtccgtatctggtgtgggggctggttgcggccgtcctgatcggctggtctcccctgcatgaatattatgcgtcctaccggcctatgtatgaatggctggaaggggaggagggcgccgggttctggcccgctctcgcggcgttcggacgctgcctgggcattgccgggcatcccgtggacgcgcctatgtggttcctgcgcgatattattatttatactgctgcggctccccttctttaccgcttgggagactatctgctctgggcgggcatggtcatgctgtccctgaactattttgcgctggatctggcggatcatgattatcccatcgccaacagcctgggatttttcctgttgggaatgtatgtttcccggtattccctcccgttcctgacggaggccgtgcgccggtacgctgtgccctttctggctgccacgcttgcgcttacctggtggctggcaggccaccgggaccagcacaactcgatgctcatcgccctgggcatgctggggctgatgtccctggccattctgttcacggaatggtttccgcgcacggccagatgggtggcggggttggctccggcgtgttttttcattttcgggacgcattacatcgtcatcatcctgttgcgtgaaagcggctggattacatggaagggggaagcgtgggacatgctctggctttgtctggttccggtcattttcgccgtgctggcggggctttttttctgcatgaaaagatttgccccgcggctggttcccctgctgggggcctatgggaaatagccgtcttgaagagccgttccgccgggacgggaagggagccgcgcttatctcttgccgtcaaaaggcaaatcccttattctttcctttgctggaaggggtggaagcggcttttttgtcacgttgccgttcttgctccacggccgggaaacaatacatggtatggcaatgattcaaggcgagcaggttcaggattcggaattatcaactcaggcggtgatctatctgggcccgagctccatgagcctgatggtggctgaggctgtccgggacaggattcgcctgctggatttccttcagcagcccgtcccgatggcgcgtgatattttccggttccaccgcatttcccggcataccatggaccgctgcgtgcaaattatcggcgactatctggaaattctcaaggaatacggagccggcagcaagctttccgtccggttcatgatttccaacatcatttccgaggcggataatgtggacgtgttcgtgaaccgcatgcacgtggcacacggcctgcgggggcgccgcattgacgacggcaagatgacgcgcctcatctacgtgaaggtgcaggaggctctggcccagtatccgggattcagcaagaaaaaggtgcttgtggtccatacggggccgggcaatacccgcgtgcttctgttccagaaggggcgcatcgtgcgttattcctgctacaggctgggaacgcaccgcacgggggaggccgtcggggaaatcgagtacggagacgatgtggcggagctttccattctgcgggagcacatgcgcggacaggtggaccagatttgcctggattacgggggcgtgaagggcctggcgggccttatcgtcatcggccaggaaatgcagcagctccgggaccgcctttcccctacgccggaaggcaaggtggcgtgctcctccctggcggcggaggcggagcggatgtcccgcaccactctggaacagcgcatgaacgtttacggggcggatttcgccggggtggattccctgctgcccgccgtcttgatgacggaaatgattgcccgcagcctgaacctggatgacgtcattattcccgcgagcggttatgacgaggagttttcaagcagcctgatacgcgcggaacagcatccgggggatctggaggcggaggttctccatttcgccgggattctggcggacaggtacaaggcggacaaagggcaccgcgagcatgtggcgcgcctgtgcatggaaatgtttgaccagcttcaggacctgcaccgcctttccgagcatgaccggctgctgctggaagtggcctccatcctgcatgaggttgggtctttcatcaaccagcagaaccaccagctccattcccagtatatcattctcaacagtgaaattttcggcctttcccgggatgatgtggaaacgatcgccctgctggcccgctaccaccggcatgaggttcccgccaattccgatcccatgtacggggagctggagctgagggaccgcatgcgcgtagccaagatggccgccatcctgcgcgtggcggacgccctggaacgcggccatgcccagcgcgtgaacggcgtccgggcgcatatccgcgggcgcatgctggagctggagcttcagggcgtgcgggaaaccgccgtggaagacttggccctgcggctgaagggcgacctgtttgcggatattttcgggtatgacgtcgtgctggcgccccagcggtaggctgatttaaaaaacttccattttccatttttcccatgtctgacgaatatatcaacagagaactttcctggctggaattcaaccagcgtgtgctggaccaggccgtaaggacggatcttccccttctggaacgcctgaagtttctggctattaccgcctccaacctggatgagtttttcatggtgcgcgtgggcggccttcagatgctgcggcattccggttcccgcgtgaaggacatttccgggctgacgcccacccgccagctgaaagccatccgctcccgcgtgggccgcatgattgaggaccaataccgcctgttccatgaggaaattcttccgtggatggaaatcaacgggatcaaccccctggcgatggaggatctcagcacttcccagaaactgacgctggagcagtatttcaacaaccagatattcccgcttctgacgccgctggacatggatgctccggaggctcccgcgctgccgtccctcaagctgctgatgggcgtggaactgcgcgacaatgagaccggggaggtgcgctccgccgtggtggcccttccggacggcctgccgcggcgcgttcccgtcccttccgcggaggcggaacgctacgtgatgctggaggacctggtccgtgagtgcatcggcaccgtttttcccggtgaaaccgttctttccgcagcggtgttccgcgtcacgcgcaatggggatattgccgtgcaggaggaagacgccctggacctggcggatgagatggaggaagtgctcgtagcccggaaattttccgaatgcgtgaggctggaagtagagtcctccgcgcccgctcccctgcatgacaaaatcatgcggatcgtaggcgccgggaaggaagagacttatgacctcaaggggcccctgatgctttccgattttatggaaatggcctttgcacccggcaatgaccagttgaaggtggagcagtggtccccgcagccgtccccttccgtggacccggccgtcagcatttttgaaaacattgccggcggggacattctgctcaaccatccctatgaaagttttgaacccgtcctgcgcctggtggaggaagccgcggaagatccggacgtcatcgccatcaagcaggtgctgtaccgcaccgccaggaactcccgcatcgtggccgccctgaaaaaggcggcggagagcggcaagcaggtgacggcgttggtggagctgaaagcccgttttgacgaagcccgcaatctggagaaggcggaagagcttcagcgttccggcgtgcaggttgtttacggcgtcaaggggttgaagacccatgccaagatttgcctggtggtgcgccgggaacagggcatgctgcggcgttactgccatttcggcacgggcaattacaatgagaccaccgccaagatttacacggatatttcctaccttacgtgcgacgaccagctgggagcggacgcttcccagttcttcaattccgtgacggggcgcaccaagctcatgcgcttccgcaagctgtatccctccccggtgttgatgaaggcgcgccttattgaacttattgagggggaggcggaacgcgcgcggcagggggaacccgcccgcatttccgccaagatgaacagccttcaggacgtggaaattattgacgccctgtacagggccgcggacgccggggtggacattgaactgaacgtgcgcggcatttgctgcctgaaaacgggcccccggcccaacggcaaggtaatccgcgtggtcagtattgtggacaggtatctggagcacgcgcgcattttctttttccaccacggcggcaaccaccagcttttcatcgccagcgcggactggatgacccggaatctggataaaagggtggagcttatggtgcccgtcaccaacggaaagctggcgcgccgcctgaaatccattctggacgcctgcttcagggacaatgtccaggcctgcaatattctgccggacggcacttccgaacatgtcgtccggaaaaaaggccagaaagccttccgtttgcagcagtacctgaccaaggaggcgcgccgcctggccaaggacaaggaacgggaacgccagcagatgctggaaccgcacacaccgcattaaaggcgctcgtcatgggcgtctgaaggtcagccgggaacagtctccggagtacgccggttttccggagagggaggaggaagccggttacggttttctgccgtcaagaatggacagcaattttttcagccacctgattttgtcccggcgtttccggaaaatatggccccgggagaagaacagtttccattgctggccgcggatatggcgccggagtagcggggccagcccctgggaaatcgcatccagttccttccggaacgcgggaagtttctttgcttccggccaccagaaaaaggagtacaggatccagtggaactgccccatggttccgggggcgtcaggaagccgccatggtttttccgggcctaccatgtgcagcagtttccatgaacgtccgcaggatatggacggaacgttttcaaattcggtcccgcgcaggagccgtgttttttcttcatcccaggtccaggacaggaattggaagttccattccggaggcaacggcgttatgtctccgtgcagggcgatatttaagatgtcctggtccggataggggaagggttccgggcggctccggagccattggagcaggcggtgttccaggttgcggcggcgcatctggtccagatccagcaccaggacgccggaattgcagtaggaaaggggggaggaaaggtagttgcccatatattccagatgggggtgcatcgttcctttttcaatactccagagggccaggccgtctccggccgccgctacggaagctccccgcaaatcggaaaaatacagttcggctacgtctccggccagcaggacatccgcgtccagataaacgattctgccgtactgcgggaacaggctgccggccatcaggcgggcatacgcaaggggggagtagcggtccttgttgccgttttgaaagagctggcggaattcttccggaagttgcaggaaagaaagggaaacctgcgtaaagggggcggcgacccggttcagcccctgtattattcgcgcgtccattccgtcgtgaacgatgtgaatgtcataaaagcgtccggaaccggcgtgaaggcaaagggtgtgaatggctacgcccaggggcaggccccagccgccggtggcggaaaacatgacggggatgcgtgatttctccggggatgcgggaacgggcggggttgtcatggcatcggggaatttcatgggaagggtcttgaagaaggggctgcgggaagaaataggccggggagggaaagagcatggaggctccgttcaggccggaaaagggatgtctgtaatttgaagaagggggggaatttgaagtctttaaatgccggggccgggatttttgcggggggtaaccgtttctccccgtatggaaaataatttggcggttttcgttcatttgtccatttcatggttcggggcgggttttcggacattcctgttcctttggcggttcctgccgggcggagagaaggggcaggagcagtccggctgttttcccggcctggtacgcgcggtccggaggggagaaatggaagggatctatatatctgcgcccctgcatgaagccatggtggtctgaaagaaccgcgccgggcagggaagatgccgcctcgcggacaatggcattaaaggcggcgagggttttctctttttcttcattcagcgtgccgtccggcccatccatgatggacgtactggttgccaggatgaggaaacggcagcgcttgctgagctgggagacgaatgccatgtaatttttgcggaagtcatccacggaaatggcggagactttattggtgacgtgggaaccgaaggaaacaatgacggcttcgtatccggcggagggaaaatatcctgcaagagtggggagatagtccggatctccgggaatcagcgtggaggagaacaagtcaatgtcttcctgaagttctgaggcaaggggccgccacaaatgccgcatgacggaatcgccaatgagcagtatgcgcgcctgccctttttctgaatgaatggccgtaatccagtcggtttcctcacggtaatggggaggggccgccaatgtcctccagcgggcaagcatgcgttccttccggcgttttcttcttttctccagcaggcggtgtattttcccggaacgccttctcacccacgtttggccgaaaggcagccggtggagaacctgttttcccagattccggtaagcttccgggaaatcttcttccccggagccgggcagggggcggtattgcagcatatcgccgcaaaagtcaatgaatggaaggttcagcttgcctgccagcgtgcgaagaagggcgttccaggcttcaaggacgcccggttcttccgcgtaggggtgccgggcgctgccgtagtcggagggcggggatgacaggaggatcaggcggcgcgtctgtttccgcagaaaggcgaaaagcctgcaaagcatatcttcggcgctttccatgggcccgcccccttccgggggcttttccatgagcctgccgttggccggggaaagatgcaggggcggccacatgaaaagaatgatgctgtagcgggcgccggaaaggctgtgctccatttgccgccacaggcggggatggttgagcgggaaattgaagatgagcgtgtcggcggccagtcgggacgatttcagatggccatggttttttgccagagcggaactgccgatcaccagcattctgtcattgccgggcaggaggtggtcgtgttgctggtaggaatagatgaacacgggaaaaacagcagttacagggatgatcgggggagcttctttgcagaataaagagtgtatccgaggatttggagcgtgtctattccgtttttggaaaacctcagccggaacatgtgccttctggcggtcttgaacttccagaagcattgaaggaggcgcaggtaaatccaccgtccggccagggcggcctcaagataagccctctgttccctgggcatcccgcaaacgtgttcggaagtgatgtccgcctcccgccagagttccgcccaatgcctgagccgcccggccggcatttcattgtccggaaaaagcagggggacaatataattcatgtaggccgtgcggttgctgcccagaaccccctcccggagtttttccctggtgagcatctcgaatacggcgtaataacttgcgggccgggtttccgctttccggttgcgagaagaaacggattgggggccgcccagcccgtagtggtagagtttttcagaggtgagggcgacgctgcggcagcgggcgatggcccgggaaacgtaaagggtgtcttctccgctggtgaaggaagaaggcaggcggacttccaggggggcggaacagccggggaggagccgcctgaacaatttgctccagacgacgccggtgatcctgtcttccagaaagagcctgaatatttctcctttctccgtaaagacgccgtcgcaggcggtgttttcaatatgaaggagtttttcctcagccattccgcgcgattctccgctttcagccggaaggaagggggaataggaacattggaccatgtccgccccgctttcttccgcgagccggtagagccgttcgtacatgtccggctcaacgtagtcatccggatccgcaaaacccaggtaaggcgccgcagcagccctgattcccgcattacgggcttccgccctgccggaattttcctgtgtaatcaggcggaaacgactgtctccggaagcatatttccggacgatgcctccggacccgtcggttgaaccgtcgtccacgcagatgatttccaggtcgcggagggtttgtgccgccaggctgtccagacagcgcggaagaagggactccatgttgtagatggggacgatgacggaaatgaggggagagggcatggtctgctgtataggaaacagggttatatccggagccatgagccggggatgagtgcgtcatccgtatggtaccggtcgccttcctccctgttgaaccagatgcgcggcgcgatgacgattttctccgcgtgttcgttgagccacgccgcccaccaggagaaagtgctgttggcgatgatgtggtggcggcagtttcgcatcagctccaaatcgaagtagccggtgccgccgtcattgatatccacatggacatggggcagggcgggcctcaggttttgccgggcccattctatgtcgtccgaaaagatgaagtaacgcagggattcctgcggagcgcctgccgcccgcagccttccttccatttcagccatgctccggaggtagtattccagaggcggcggagaaaggtaggggttggagaggtaatccgttctgcggatgtgcagggaaatggagcagcatgaacggatatcttcaagaatgcgggcgttttccggagtcaggggagttttcagacggaattccctgcaaagctgttcccggcagtggaggaagtattgttccgtctgaaaatatcccttgaaataggtatggcggcggggaggagccgcgagaccgggatcgaacccgtgccgtttttcctcccggaaatgaggatatttgggagcggcgaacagggaacgcaggcaggcgggaatacgggacttgcggaaagcccaggggggagggcctccttcaatgggaagggaaacccggaagtgatggagttcgcagaccctcttatcatcatgttcatatgatgaggcttccagtcttgcttttcccccttgccgggagagcgcgaagaggaaggcgtattggaacagctggtttcccagccctccgaaaagacgcatgactattatttttccttttgccatgttcaagcaggggaaggggttaaaacgtgatattcctgcgtatttcctccagctgttcgcgtacttgccgcagctgtgccctgccattcctcctccatgaggggacagggcagaaatggaggagcttccggcggattccggtgtttttgccggccctccggagccttcttccgaagtctgaaaagccggaggattgcaacaacaggcggaaaggaagatgcagggaggccctccggcactcggcggccgtgcaatgggcggtcaggaagtcccggatgatgctgtaaagtatttcctgctccggcggggagaaaggcatgccaagcagcctcagttcaaatggttcatgctcaataaagcggacgagatggccggcttttcttttccagagatggcgttgttcataaaactcttcaatcagggaaagccaccgggggatcatgggcaggatgtcggcggttcttttccgtatctggtggtggttgccctgttcatgctggcggtaatggtaaacggcctccggacagaaggaaattttttctgtcagcgcgagcacgaaatgcgagaagaggccgtcttcacaggggtgaatgccttccgggaattccagattgtttttcaaggggaactcccggcgcagaaatatgccgcaggtgggcagggcggggattttatccggcggaaacctgtcgcagaacagctttcccgctacggtcaaatcgcttgctccgcggtccgaggcgtccagaagatgtttgagaaaggccgcgtcgatgaaatcgtcgccgtcaacgaaacacaaatagcgcccggaagcgcgccgcatgcccagatttcgggcggaggaaacgcctctgtttttctgttcaaaataacggattcttgagtccgcctctgaaaaacgccgggcgatttcccccgacgagtcggaggaaccgtcgttaatgatgaggcattcccactccgcaagggtttgccggcgtatgctgctgatgcactcttcaagatatcgttcctggttgtaaacgggaacaatgacggaaacctggggctgtggcgggcaggattgggtcattggcgggactgttgaggttcggagggggagcatgcggcaagagcccgcttcaggttggagcgggattccctgtcaatatccctgcccaattggagaagcgcctgctgcatttccgcgtattcctcctccgtttgcctgatggcgcggagcatggcgccgccaagcgtttcttccctgtaaaggagtgcgttcctgtcgttgaagccgtagaaggaagcgaatttctcatggatgaccgggattttcgcgaatccgtaaacaagctgggcggaaccggtgacgccggtggtaatgtagcggttatgcgccggattgccgggatcaagcaggggcaggaaatagtccgcccgcctcatggcctcgtacatggcggggaagtcgagctttccggccacatgcaggaaggggcgcagatggccggggatttttcccagctctccttcccccacgatgatgacggaaaagttcctgtacccttcattgcagacggtttccagcgcctcaaccaggagttcgtggtttttccgctgtgcggagagggaccctacggtgatgaacacgggttcgcggttccggggcgcaggcgggatttccccgaaaaagtgcggattaaccatcatgcccctgggaaaggagcccagcgtcagcaaccgtccctggcggtcaagttcttcttccccgaaccgggggatatcctttaattcatgttcgacggccagaagattggtgaatctgtcaagccccgtcatgtgaaggaaacctgcccatcccggagtgtcataaaaggcggatgttgatactaaaatggcttcgtaccggttgaggacgggagctttggccaggcgcttccatgaagtgcacatggctgtgaagatctggatctcgttttccttgaaacaacacaggggcgattgtctggccaggctgtgatgcatcaggacatcaacgcggtatcccatgtcgagcaggtggcggcagaaaccggggatgacttccccgtggcaatagttgggttccagaataaggatggtacggccggccactggatgcctgcgccatgcgcgcatgcttcggcgggcgtcccggtcatagtcggacaggaaatcgcgcaggaaagtgcgccattttttacgcaggttccgaaacggaatacacatggtcagcaatcggagcatgactgtctgcgtatgtgtcattggtttcatggtgaaaaattgcaggaaatataatgaatatcgcctgacgcggatgatgaatggcccttgttaccgttccgggcggtttttcccccgccgggtaaaaaagaatacgttgtgtgacgagggctgaatacttaataaattcatactgaaaagcaatatcaaaaaaactccttggcgcatgatgccggagtattcctgacggtttgaattttccgccgtattgcagccgtaccacagccctccgtttccgttattcccgggaacttccttcgggaggcagcctttgcatttctttccggaaacagtttccctcttccggttgttccgtttttcaacagatggcgttgctgttttttcttgatgtgaattttcaatccggataaaaaaggatgcttccgccatgagcgtatccgtttccatcattgttccctgttataatgttgccgcctatttggaccaatgtatggaaagcctggccggtcagagcatggaagatatcgaaatcatttgcgtcaatgacggttcttccgaccatacggcggagatattgcgcgaatggcgggacagggacggccgcgtccgggtgattgaccggaaaaacagcggtgtttccgcggcgaggaacagcggcatggaagaggctgcgggaaagtatatcggttttgtggacccggacgacgtggtggagcggaatatgttccggcgcctgtttgatgcggccgtggaaaaagatgcggacgtagcggtgtgcggataccatgagttctgcgaccgcggaggcatggatatgcctgaaagcggctggtcgccgtcagccgggtttttcccggaagaaaaagcggagcggttccggcgggggacgccctggagccggtgcgcgggaacggtgtggaataagctgatccgcaggaagctgctggaagaaaacggtgtgcgtttcgttcccggattgcgccagggggaggatttgtatttctgtttgatgctgttgactgttgctccgcggctcctgatccttcccgaccgtttgtaccattaccggagggaacgccccggttccgcctcctgcgggcgggatccccgcctgggggatttccgcatggatttgatgggcatggaatctctggcgcgtttctggggggagcgggggctccttgattcacccgccgccttcggtctggtggactactgcatggagttgatgcgcaggcatttcatcatgaaagagggagcttttttcagggcgtctccggaagaccgggaagttctgctttccggctggaaaaagtggctggagctggtgggcgcggagaacgtcctcccccgtctggaccgatgggaccgggctttttgccgccttttgctggattacccctgccggagcaattttttctctgccctgcattcccgcctgatgtcgtcccgcaagggacgccggggggcttactataccctgaaaaggcgcctgatgaagtgaaaaggggaaattcctccccctttccctgttgttccggtgccgcatggggttgcggaaaggcggaatgcctgccggcatcctacaggcccgtgtagcacatctgctctttgagttgggccacctggaggtcttcccccagatattccccgatggagtagccgaagagcatggcggcgccggggccgttggcggtgagcatgttgccgtccagcaccacattttcatctttcacaatatgggcgccggcttcgttgagttcccggtaaacgtcctgggccgggtaggccgtgacgttcctgtccttcaccaggcccgctttggccagcacgatgggggcggcgcagatggcggccaccagcttgcccgcttcatgcatttttttgaccagatggataacttccggcgtgtcgcggagtacccaggagcccgcgccgccgggcaggatcagggcgtccagcttgtcggcatggagtttatccagcatggtgtccgtgctgacggttacttcatgggtgctgaccaccttgtcggactggacgccggcaagcactacgtccatgttcaggcgccgcaggatgtccagcggagccatgagttcgatttcttcaaatccgggggcggcaagtatggcgacttttttcatggttggtaagacagggggaggaagaggaacgttcaaggaaaaaagcagcatgttccggtagccctacaggaggagaagaaccgggttttccagcagggttttgaattcggcagcaatgttggaagccttgcattccggcagaatgccggcgttcacgtacagggtgacgggcaggatgagtttggacacggggcgccccgcttcaatgcccgttttcggcgtggtgcctcctatgctgatgatgctgtggggcatttccggcagcacggcgcgctgggctgccacgttcacgccgctgtcgcaaagaaggatgttgggcgcgacgctgcccgcggggagcgggcctgccgcaggggcggccaggcgttccatggcgatgttgtaaatcgtcttgccggaggcgttttcaatgaagacgtatttttcccccttgtccagcaccatgagcagttccgcggcggcgtctccggccagccattccggctcgctggcgcatgctttcaccgccgcgcgcaccacgtagtcaaagaggctgtagcggccgccgatgagtttttcgcactggacggcgatgggcgtgctgatggcggccaggtaagccatgttcgcctccagggaatacaggtaaaaattgtctacgcgcgtggcgtggcgcgtgtcccggggcgccagcggggtctgcacccggcgggcggggccgtccgcggggcgcagggcggcccgtacatccgcggccatgattttgccccgggggccggtgccgcgcagcgtggcggggttcaggccggcttccgccgccagcctggcggccagcgggctgcatattgcggacgggcgcggggggcagccgcagacggctgcgccgaattccggctgaagcagcgcaatgggcgctcccgccgcggcggaacctccctccggcaccaggatttccgtcagggtgccgtcctcgcaggcctggagctccacatgggccttgtccgtctcaatatcggccagatggtcgccgacttttacaaagtcccctgtttttttgaaccatctcaggacggtgccttcgtgcatggagtcggacaggcggggcatttcaatggtaatagccatggaggtgaatgttgaaatatggtaaaaaggaggaaggcgcgccggaaggggcgggacgtctccttccggcgcgcggaaacgcggttacgcgctgtatttttccacgccgtcgatgaataccttgcaggtattgaagtcatcgtccagcagaaccatgtccgccgtgaagccgggggcgattttgcccaggccttccaggcccagggactgcgcctggttccaggaggtggctttcaccaggtcgctgaggggtttcccggtcaggcggtgcacgtttttcaggccgtgggcgtatttgagggtgctgccggccagggcgccggattcctgcagacgggccacgccgtccttcacgatgatgggtaggccgcccaggtctccggggccgtccggcatccaggagcaggccagggagtccgtaatcatcagcatctggtcagaatccttgtttttgaacacggttttgagcatgtccgcgcagaggtggatggtgtcgcagatgatttcaatcttgatttccctgtccagcaggccggaccccaccaggccgatttcacggtggtgcaggggggacatctggttgcaataatgggtcaggtgcgccagccccgcggacttcgccctgttgaagtcctcatgggtggcggcgctgtgcccggcggagcagcggatgccgttggccgtggctttctcaatgaattcaatggctccgggcatttccggcgccagggagaccagcagcaccttggcgatggagttcaggttggctacttcatcgtaatccggctggcggacaaaggcgggattctgcgcgccgcagcatttggggttgatgaacggcccttccaggtggacgccgggagtcttggcgaattcctggttcttcatgtattccgccacggaggcgcatacgtcttccagcaccttgggggacagggtgagggtggtcggcagccaggaagtgacgccttccttcattttgcattccgcaatggtgcggaggctttccagcttggcgtcgcaggtgtcgcagccgccggcgccgtggctgtggatgtcaatgaagccgggaaggagcatgcggccttccgcatccacgaccttgtctgcggcgggaagttcgctcccggcgggatagacggcggtaatggttttgccttccatttccacggcagccccgggcatatcaatgccgggggagatgatgcgtgcgtttttaatgagtgtcttcataaaaatgaatggttgttggatggatgtttatcgtcgtttttctccgttcgtccgcgtcttcccgcctggcctccgcttcctgcggaaaaccgggaatgggcggcggcgcaccggagatcgttcatgccgctggcagcttcctggttatctggcggcgtccagggccttgttccaccgggctacgcgggtggcttccgctttcagcacggcagccgcggcgttcttgtccagaatgcggatgtccttgattttgtccccccggacaatggagttgacgacgtcctgccctttcagcaccttcccgaagaccgtatggcggccgtccagatggggcgtggccacatgggtgatgaaaaattgggaaccgttggtgccggggcccgcgttcgccatggaaagcacgccggggccgtcatgcctgaggtccggggaaaactcgtcttcaaaactgtagccggggcctcccatgcccgtgccggtgggatcgccgccctggatcatgaaattcggaatcacgcggtggaaggtgatgcccttgtagtaccctctgctggcgaggttcaggaagttggctacggtgacgggcgccttggaggggtaaagggccagttcaatatcccctttggtagtggagatgacgacattgacgtccttgaggccggctgtggattccgcggaggcgctgaagcacgccagggcgcacagggaacacaacagaagggtgagatattttttcatggctttttgttttcccccctatgttgcccgaataaaagcagggttgcaagtaaatcgcgcgccctgacgggagaatggcgcggggcgcgccaatgcgggaaggtttttctctgaagagggatttttaaggatgggcgtccggttgccggcccaggactaccttgagccggaagccgcgcgggaaaaacggaagaccgcccacgccatgaagaggctgaggattcccatgacgacgaattgccaggagggggggatgaccagcatcatggcgtattggaacccgacggccagcaacccgagcgcgcagtccaccaggttgccggcggcaatcatgtccccgcgtttgtcattgtccgcccggtcctggaaaaaggcattcagaggcaccaggaacagggcggcggaaatgcccgccgccatcagcagggcattaaagaccggggaagccatggagactgcggccagggccgcgcagctagccgccatcagcacgcctcccgccacggaaacattcatccggatgtggcggcggcaaatcacggaggcgagaatgccccccagcaccgttcccccgctcatccaggccatcagcacggctcccacggagctgaagtcatccccgccaccggagatttccttggccatctggatggtcatcagcatgaccgtgccgccgaagaaccagaaatagccgatgcccatctcgctgacgcgcagattgcggtttttccacagcttgcccagctggtggaagtgttcgtaaaacagggaccaggagaaggggcggccccccccgggagcgtaccggggcaggcggaagctggaggccgccaccggaacggccaggagcagaaacaccaggcatgggaaagaggcggcataccatccgtcattgatgccggagggtttcagccatgcgtcaaaccactggaagaagccctcccccagccagcggtgccagatggtatccgtggaaggctccagcaggtagcggaaccagatgaagacgccgatctgcccgatgagcaggctgaggatggaagccatttccacgatgccgctggcgaaccccatgcgggaagtccccacgatgtccttgacgattccctttttggccgggctgaagacggtggcctgcacggcaaagacgcagaaccacaggatggccccgttcagattgtggacgcgcaggctccagtacatgcccgccagcacgcatatctggagcagggccatgaattggatgatgcgcgccttgcagaaacggtccgaaagccagccgacgaatggggagaacaggatgaagggcagcacgataatggcccccagcggatattccaggtccccctctgcgccatacagccagacgcccaggggaatcagcaggaattgagcccctttttcattaaaggagttctgcgcctgaatcagcacgagccgccagaaagctccccatggaactttgcgggcgtgtcctggcgtgtgggcgctggaattcatgaagttacaggctgggctcctccgctttttccaggccggagccgcggaacaggcacagcacgccgatgacggcggtcaacagggcgctggcaatcagggaggcttcttcactgaaaccgcacatttccgggctggagaacagatattggaatactaccaggctcaggaaggcggcgggggccgccgccggccagcagcagcgttttttgctgcgcaggtaaatggaaacggcccagagcgtggcggcggccagcagctggttggcccagccgaagtactgccagatgacggcatagtccatgctgctgacggcaatggccgcggcgaagagagggatggcgatcatcaggcggcggctcagctgttcctggctcagcttgaagcagtccgcaatcatcaggcgcgtgacccgcagggcgccgtcccccgtgctgatggggaggatgaccacgccgatcatgaccagaatggagccgacgctccccatccaggattcggaaatcgtctgaatggccagcgccggagcctttccgttggcggtagcccctcccagggcttccggagagccgtagaaggttagtgcggcggcggcccatatgaaagcgatgatgccttccgtaatcatcgcccctccaaagacgggcagcccttcccgctccgttttcagacaccgcgccatcagcggggactgtgtggcatggaagccgctcacggctccgcaggcgatggtgatgaacatcacggggaaaagcgggaaatccgccggatggcggttatggaaaaagtccagatccggaagcacttccatgcggggcaggtgcatccaggccggcatgaaatccgcaaagggagccaggagcattacgcccagaatgcccatgaccatgatgatcagggcgacggaaaaaagaggatagacctttcccatgatagcctggatgggaagaatggtcgccagaaaataatagccgaagataatccaaacccatgccgaaacgctccagcccgtcatgggggacaggatggcggcgggccccacggcgaagacgacgcccaccagcacgctgaatacgatgcagacggcgcggctgatccactgggcctggctgcccaggtagcgccccaagatttccggcaggttttcccccttgtgccgcagggaaatcatgccggagaagtagtcgtgcgccattccgcccagaatgcagccgaaaacgatccacaaaagcgcggccggcccgtacagcacgcccatgacggcgccgaaaatgggccccagccctgcaatgttcagcaactggatgagaaaaacgcgccagcgcggcataaccacataatccacgccgtccgtacaggccacggcgggagtttgccgggaggcgtccggacggaaaatcctttccagcacccgcccgtaagtgaaataaccggccgccaggaccaatatccccagaatgaaatagcagtaaccgttcatgttggaaaaagggccagccatctcatggacaggctgtccgttcacggaacttaacttttctcccgccttctggcaagccgttagtgaaaggggggaaaatagggaacggattccaaatccgaaaagtaaatccacgtctctttattatgcataaataattggtgttgtaaattttatgatggttttaaatcttccgcggcaaagcttctgattataggacgccgctgttcctatatttgtataaacatctcgtttctattgtttagtgttgacttcggatttggaatccgctaaacggaaaaggttgataccattcaaccttccccagttatgaagaaaacattgataatcattgcgtccctggctcttggcgcggcggcttcccaggccgcggtgctgtgtaccactacgtttaaccggaccgggacttccctggattccgtcactgtgagtacggtctccgatgcgggactctccacttccacctcgattgcttcccaggacttcagcaagagttctgcgggcaatgacctgctggcttcaggttctattccggcctccgtattctcccccaattccaatgtgggtaataatcagaataatacatggagcgtttctttcacgtttaccaacgacggttcccaggatatgctgatttcttccattgatctttccatgatagggttcactggagcgggcgccgcgcagaatgccggaggcggtgtggccaataacaattatgttgggggagccgacggcaatctgaacaaacctgtcaatatcacccttggcatgagcgggcaggacgatcagacgctggcctataatggcgccaccagtacaaatacatctacgggatcctgggatggcgttcgtacgggaagctatgaatatggcgatgtgttgttgaaagccggggaatccatgacgttaactgttacggcttccaaaaacgaggcctacggcagcggctgttttatcggtcttacgggaattcagattaagggggaagtggttcccgaacctgctacggcttctttggggcttttggggctggccgcattgatgatgcgtcgccgcagacgttgaagcccatgtccctgatacacttgttcaagccgtccgttttttctttgaaactggcggcttgttcattttcagccaacaaaattcggcattttttaacatttaatatcaataaccggtatgattccccaggcagtccgttcttcggcgtgatgtcctccgggtcatcgtttcgccagccagccatgttcccgcaccgtttttttaccgttctcctcttttttcttctgttccttgctccagccggatatgccgatgttgaatatgtctggaggggtgccgattaccagtggggttccctgtccaactggagtgtcggaggcgttgccgcctcttccgcgccaggggccgccgcttccgcctatgaacattggatggtaaccaatggaacggattccgcgggaaggacggatgtcggcggattgggcgcggggggccgctatttgaagggcgtcaggattgaggggcttaacagccagccggaaggcaaaatcccattgttcattaaaaacacgaacaaggatgtatatttgcgcgtggaggagggcggcattaccgtggaaaatgccggagaaggcggttattctgcggatttcggggtcgcccagctgcgcgtagccgcggaccaggagtggcatgtggctgaagggcgcagcctgtatgtggggcatgacgatgacgctccgtccgggggattgtattccctgacttcggaaggcgatgttccgcggcgcgtgacagtgacgggcggaggcgccgtgcgcatcggggaagggatgctgctgaacaatatttccggcctcatcggttttgtgctgaacgccggaaagggaattccgacgctggatctggcggaccggggcatgggcaatacggtgacggtggaagacgctgcccgcctggaaggcatgtctttgtaccagggggccctggtgacgcgggaaaacgcgtccgtgactttttccggaacggaggccaaggcgtccggacaatggaacattggcgcggacacggagttggcgctggaaaattccacgctggacctgacggaggcgggtgtggacggcaacgtgattctttccggctcttccggcattaccggggataagggaacgctgcggcagacgcttctggatgatgcccgggtcacttatacggacaggaatgtcaaggcgggggaaatccggagcgtaggcagcaatgtgacgataacgctgaataactcctccatgcattttgacggagaaataccggcggtggacctggtggtgcagggcagctgcgcgctgggcggcagcggcgccttttcaggaacgattacttatgcgccgggaggcaccctgactgtggatggggatatttccctgcccagttcatccctgacgctggggcgtctccatgtggctacgctggacggcgtgccgcaaaactccgccgtccggccggaaacccctgcccagcaggcaagggaatatgtggttttgtttgattcctcctttgaggatttgatttccgaatggccgggcaggcatacgctgggcgtgcagttccggccggatatgggcgtccccgtcaccgtaaaggaactgcctgaaggggcggtttcatggaattatgatgccgcatccggctggctgacgctgcagacggatgtagcggaaaagccggacatgccggcgcatgtttccggagccaggcccaacattatttttgtcctggtggatgacatgggctggggggatatgagcgtcaactggacgcagcaggataaaaacggcaggcaggtgacccgcaggaatgaattcaagacgcctacgctggacacgatggcggcggagggcatgcagctgaggcgccattacagtgcggctccggtatgcgctccggcccgcgcttccctgctgctgggcgttcaccaggggcattcccgggtggtgcgcaacaatacgtttgattaccctatcgagaattcccatacgctgggaacgctgctgaaaagcgcgggttaccatacggcggccatcgggaaatggggcgtgggcggaggcggacagagcggcaaggctctgaccgcggctccccacatgcgcgggtttgattatttttacggaatcatcaagcatttggcggggcattaccattatttgacggcgggttcccaggatatttacgaatataatgaccaggccgcggctccggcgtgggagagcgtcagcgcgaaagttccgggcaccgcctatgatacggatttgttcggggcccgcgccaaacagtggattgtggaccaccatgagaaaactccttcccggcctttcttcctgtatctggctttcccggctccccacggcagtctgtccgctcccgcctgtgcctatccggcggggctgggaagggacggcggcctccagtgggagaaaaaagacggctatgaagcctgcaataccgctgcggacggatggtcgggggtggagggggatttttctccggatacctatatctacccggaacatgaggtttttggaagaacggaatcccgccacgccacgatgattcgccgggtggatgacgtcctgaaggacatgatccagctgcttaaggatttaggcattgatgacaatacgatgattgtcttcacgtccgacaacggcccccacaatgaacccggttccggcaattacggcaacggcgcgcaggatcccgcgtatttcatgagctacgggatgatggacggcattaagcgcgattgctgggaaggcggcatgcgtgttccggccgtggtacgctggcccggtgtggttcccagcggaatcagtttgaatgccagccagttccaggactggatggctacttttgcggacgtggccggagtgcccgtgccgtcccgttgtgacggcgtttccctgctgcctacgctggcaggggtgccggaacgccagaaaacgggcgttatttatgcggaatatgcctatagcgggagcactccgaattacagcgatttcctccagcaacacagggggagagggcggcagcagcagcagattatatttgtggacggcttcaaggggattcggatggggaatgccgcccccgctacggattttgaaatctacgatacggaaaaagacccgcaggaagcggcgaatctggcggcatcccgtccggacctgcaggagaagatgaaggcgcaggcgctgcgttcccgccgttcctcccccattgcctccaccagttttgacgccggttatatcgcgcccgtttccgcccccgctggcctgcgggagggaaggctgtgctggcgcgcgtggaaccgttcttttgactgggtgccggatttccggcagctggaggaggggccctgttctacgggtgcgacggatgtttccgacgtgctcagcgtcaaggcggggctttccggtcagaagggggtggaattgacgggctatctcagggtgcctgtcaccggggaatatcaattttaccttcagacggattccaatgaaggctccagggcttttgtccatttgcacgatatgcagctcattgatgcggattatgcctatactcccggaacgcaggctgcctccaacgcgcgggaaggcgtttccggcgatgtgcagcccaatgccgttcagacggtgaagcttaccgcggggctgcatcccatccgcatcggctatgtggggaaggcggcttcctcctccctttccctgcaatgggaggggccggaaaccagcggcagggaacccgttcccgccagcgcgttttcctatgaatacgtgaatcccttcaatctggaaaagacggaggaaacggtaggatgcgccgcctccggtacggggctgaccgtgcagacgcatcttccctggacagtttcctgcgaccagccatgggttacggtttcccccgtttccggttccggaacctcagtgctggatattgccgtggaagcaaacgggctgcaaacggagcgggaagccgttgtcaccgtcgtatgcggcggggagcagaggacattcacgctgcgccaggaagctgctcctgccccggcagggtacgacaagtggaagcaggaccattttgcggatgggacgccggatgagcaaatggccccggatgcctgccccgccggagacggaatttccaatctgatgaaatatgctacgggcatggatcccaaccagccctgcgggagcgtgacgaagctggctgtccgcgaggaagcgggcgggaaatacctcgtgctttcctggcctgtgaatccggaggcgacggatgtgacgttccatgtggaaagttcttccgacctggaggaatgggctgacgaaggggccgtcactccggacggggcctgcggggaattccgcgatacggtcgcgctgggaaaaggctctccggagcgccggtttctgagattaaaggtgacgagatagggaatcaccggtttctctttccgtttcccgatgatgattccttacgggaacagggaccttccggccctgctgccttgccgcccgttacggattttttccggaagcgtgattctgcgtgttccggccctccgctgtcccggcgcatccagcgcggtacggccggggacaccgtgccttagccaggggaagaatattactccccgtcattttccgcatcggcagggggggctttgggcaggttcttgtcaatgtcttccagaaggttgaccaggtcaacgccgcgctgggcggagtcgtccagacggaaggtcaggcgcggcgtattgcgcagcaccacgcgcctggccacggcggactggataaggccgtgacgggagttcagtttttccagcacctgggagggagccattttccctacgacgcccacccatactttcccctctttcagatcgtccgtcacttccacttcaatcacggtgacgattgttccgggaaattcaaaatcccgctgaatggtggtgcctatttcccggcgcaggagttcgtttaccttgtcagtgcgtctgctcatatgaagggatagagtgatgaagggaccgattggttcaatcggagaaggaggaataagggaaaggacagggacggaggtttcctggacgcccggaggagcgtgcaaggagctccgtccctgttggatgatttttgttgggggttacagcgtttgctggattttttccagcgtgtagcattcgatgatgtcgcccgtttcgtattcgttgaagtctccgaggcggatgccgcattccagaccagccttgacttcttccacttcatcctggaagcggcggagggtggacattttaccgtcaaagacgggcgtcttgtcgcggatgacgcgcgcctcgcagctgcggaggattttcccgtcctccaccatgcagcctgccgcacggcccttgttgagcttgaagacctggagcactttggcgtggccgatgatggtttcgcgcgtttccggttccagaaggcccagcatggcatcccgcacctggtcaatgagttcgtaaacgatggaatacagttttacctgcacgccttcccgcttgagcagtttgacggcgttggcttccaccttgacgttgaagcccaggatgacggcgtccgaggaggaggccagcagaacgtccgattccgagatggggccggcggaggcgttcaggaagacgcattccactttgtccgactggatgtccagaacagctttcctgatggcttccacggaaccctgcacatcccccttcaggagtattttgagctgggctttctgggtgccgtcccccatcatggcgagcagttcttccatgcgtgccttgcggggttgggccaggcgctgcttgcgcagttcctcctggcgttcttccccaagctttttggcggcgcgttcgttttccatttccaccagttcgtcccccacgttcggggtttcagagaagccggtgatttccacgggcatgccgggccctacctttttgacgcgttcgccgtggtcgttgaccagggcgcgcaccttgccggcgtaagggccgcagatgaagggcatcccgacgcggatggtgccgctttccacgatggccgtggcggagctgcccgtgccgggttccacgcgggcctcgatgatggaggcgcggcagttggccttggggttggcctggagttccagcacttctgactggaggacgagaaggccgagaaggtcgtcaatgccggccccggtcagggcggagacttccacgcattccacatcgcctccgaagtccgtgggaaccagcccttcttccatcaggccgctcttggtcttgacggggtctgcggccggaaggtcgcatttgttgatggcgacgatgatggttttgccggccgccttggagtgggcgatggcttcccgtgtctggggcatgatgccgtcattggcggccaccaccagaaccacgatgtccgtgacgtccgcgccgcgggcgcgcatttctgtgaagatggcatggcccggcgtatccaggaaggtgagcgtgctgccgttgtagtcaaccgtataggcgccgatgtgctgggtaatgcctccggcttcccccttggccacgcgcgttttgcggatgtagtccagcagggatgttttgccgtggtccacatggcccatgacggtgatgatgggcgtgcgcgtgatgagggtggctttgggttcttccaccaccggcacgggttccggttccttgacgggttcctgctgggctttcacgccgccgcccttttcccgtttttcacgggcgaatgtgtagccgtggaggtcgcagatggaactgacggcgtccgcatccagcggcgtgttcgggttggcgaagatgcccatgcccatcagatccttgatgatttggaagggcttggctttcagcatgcccgccagctcggaaacggagacgggcggcttgaggttgatgattttatcgtctgcggagggttcttcctggggtgcgggcgcggcgggttctgcggcggccggggcagcggcgggcgccggagcggcgtcagcggcgcgcgacgcttttttcttgttgccggaaagcaagtcgagagcttctttcttgactggagcagggcgggagggagccggtgcgggggccggctggggtgcgcgtttctttttggaagatccgccgatcagatccaatacttcctttttgggttctttctcttcttgtttattaggcatcttgatttaaggttgttagatgttgagcgccgcgctcaacggttattgggagataaggtcccgggccttgtccagaatttgggcggcttcctctgcgggaatgcccatgctttccgcgatgtcggaagcttcaaatccggtgagggccaccaggtccgttccgcccatggtcaccaggcccatggcggtttcttccgggatttccaattgttcgctgagggttttggccgcagcctggcattggcgcatgacttcttcggccgcagcctggctctggcgtttttccgcttcctggacgtcaaagacgcgcacctggacatcccagcccatcaggcgggaggtgaggcgggcattctggcccctgcggccgatggccttggagaggtctttgtcgtcctggacgataacgaagatttttctggcttcctcgtccacggtgatttcccgcggttccacggggctgagagcttcccggacgaaggtaacggggtcttccgtccattccaggatgtccactttttcattgttgagctcccggacgatgtttttgacgcgggcgccgcgcatgcctacgcatgcccctaccggatctactttgtcgtcatggctgatgacggccactttggtgcggtagccggcttcgcgggcgatgccgtggatttccacggtctggtcgcctatttccaccacttccgattcaaagaggcggcgcaccaggttcggatggctgcgggaaaggatgacttccgggccgcgtgcttccgtgcgcacttccaccacgtagaagcgcatgcggtcgccgacgctgtagtcttcattcggcacgcgttcgcgggaggtcatgacgccttcgaatttgccgaggtccacaaaaatatcccccttttcaaaacggcggatggtgcccgttaccagatctccggcgcggtccttgaactcgtcgtagagcatttccttttccgcatccagcagtttctggagcatggtctggcgggcggtctgcaccgcgatgcggccgaagcccttgggcgtgatgttggtggggagcaggtcgtgaagcacggcgtttttgtccagcttgacggccagggaaagggggatctggttgaatttgtcggagtattcttcatccggcaccacttccaggtccgcaaaaatacgcaccttgcccttgtccacgttgatttcggccctcaggtagttgatgctgccggaaccgggaaccattttgcggtaggcggagagaaaggcggactccagagcgaggagaattttttcacgggagagccctttttccctctcgtagtagtcaatcaaagctttaatatcgtttgtcatgagtgtggaggagtgtgatggatagacaaaaaagagcgggtcgacagacccactctcgagtgcctctcggggtgtttgcctatctaagtaagcacgagggggaggttctggcaagaaaaaacgcttgttctatgcggcatgcaaaagactggggatgattccggaagaagaattttccggagccctccgggagggggcgggacaacggtgtttgagggcttgacggacccgtcaaaaacgggaagtatgcgcgcatgaaactcgtctcatggaacgtgaacggattgcgggcggttctgggcaagggaatggcggacgccgtggatgccctggagccggacgtcctctgccttcaggagatcaaggcgcgtccggaacaggtgaaagacctgtggatttcctcctggccgcaccagctctggaatccggcggagaaggccggctattccggcgtgctgatcctcagccgggtgcggcctctttccacgtccgtcggaatcggctggccggagcatgaccgggaagggcgcgtctgcacgatggaattcgaggggttttacctggtcaactgctatacgcccaattcacagaatgaactggtgcgccttccgtaccgggagcagtgggacgccgcgttccgcgagtatgtggcgggactggcggaaaccaagccggtcgttttctgcggagacttgaacgtggcccatgaggagattgacattgcacgtcccaaagagaaccgtttttccgccgggttcagcgaccaggagcgcgccgggttcacgctgctgcttgaggccggttttacggatacgttccgcgctctgcatccggaggagccgggctggtacagctggtggtcctaccgcgcgggcgcccgcgcccggaatatcggatggcgcattgactatttctgcgtttccaatccgctggcttccagggtgaaggatgccgccatccatccggatgtgacggggtccgaccattgccccgtcagcctggagattgactgctgagcgcggtctttcagatgattttcaactgtaaaagattgatgattatggaacaggaattgccgctgctggtggttgccacgcgcaacgcccacaagaccggggaaatccgcgccatgctggccgggaaatgggaagtgaaggatctttccgactatccccaggctccgcccgtggatgaaacgggagtcacgtttacggagaacgccacgctcaaggcgctttccgcttccaaatgcatccccggcgtcctgctggcggatgattccgggctggaggtggatgtgctggacgggcgccccggagtctggtcctcctccttcggcggggaggaagggaaccatgcgcggaataacctccgcatgatggaggaactgcggcgcgccggcgtgaagccgggggacaggccttccgcgcggttccgctgcgtcatggtgcttgccgggaacggccgcgtgctggcggagttttccggttccgtggaaggctacatgttgacggagccggccggagaaggagggttcggctatgatccgctgtttgtcccggaagggtatgaccggagtttcgcccagcttcccatggaagtgaaaaattccatgtcgcaccgcgcccgcgctctggcgcaggtggtggagtggatgaaggaacgccgggcctgaggtttttcccgggcgcctggcggggggggggaggtcagtccagcctgaaggcgcatatctggaagggtgccggtgttccggtgttcaggagctggtatttgccggcgcgccaggaatgatggggcaggcgggacaggaaggcttccacggcttccgcttcttcctttcctccttcgtggccgggatagcacatgacgctgagaagcccgttcggggcaatgagggcggcggcctgttccagcgcggccagggtgcattccgtcctggtgaccgtttttttgtccccgcccggcagatagcccaggttgaagacgatggccttcacggggcttctgaccagttccgccaggcggtcatggctggcaagatggagccggacggaaggggtgagcagcccttccttctccagacgctccctggtggcgcggatggcttcttcctgcacgtcaaaggcgtgcacctggccggaagggccagccagccgggccaggaaaaccgtatcatgcccgttgcccgccgtggcgtccacgactgcgtccccggggaagacgacacggctgatccagtcatgagcgcaggtcatggggcggctgagcagggaacatttcatgaccgggttgtacagaagctctgcctgtatgacaattcgtttatgaaattccggtgcgggaagaatgacaggttgttttttggcagggcatgtgttaggaagaggcataaaaccttctgcgtgttcccgcatgcggggataaaccacagacgttggcatgaagatgactgacagacgcacttttttgaaaaggactgccgccgcaggggcgctggcggccatatcggacatggattccctgttcgcccaggaggccggagctccggcggcttccggcattccggatctggtggccgtccgcaacggcacccgtgcggagatggtcaggaaggccgtggagacgctgggcggcatgcaggccttcgtcaagccgggccagaccgtcgtaatcaagccgaacatcggctggaacaaggctccgggattcggcgccaacacacatcctgaaaccgtcgccacgctggtggagctgtgcaggcaggccggagcgaaggaagtaagggtgtttgaccactgctgccacaacggcgcctatgagggcagcggcgtgaaagaggccgtagagaaggccggcggcgtaatggtggacggcggcaatgagagccagtacgtgcagacggaaaacccgaaagcccggaaattcacctccgccaaggtgcataaggccgtgctggaggcggatgtttacatcacctgcccgcccctcaagcaccacagcggttccgagatgaccgcctgcatgaagaatgtcatgggcaccgtctgggaccgcggggccatgcataagaacgacctgcaccagtgcatcgcggatgccgtgtatttccgcaagccggacctgtgcgtgctggacgcttacatgcccatggtgcgcaatggccccgtggggaaggatacgaatgatctggtggagcgcaaaacccttctggcttcccgtgacatcgtggccattgacgctgcgggcgccgccctgctgaacaagaccggaaaaattcgccatgtgcagcttggggaggaaatggggctgggcgtcgccgacctttccaggcttcatatccgccgtatcagcatggcctgacgcggcggctccttctcccgtctgcggatgacgcggtggagggccaactttccgcctccggcgggtttatgataaatatgtcagtcatcaaagcctttctcgtcagtcctctgaagtggctccgcgtgacggtggccgtcattttctttattgggattgcatacgcttttctgcaccacattcccgcgtggaacgtgccgaacatgacggggggcggagagggggtggaagattccttttccctggcgcggtggcaattggtgccgtccgtgctggggaccttgagcggggccgccgtttccgtcgtgattctgggggttttgctgctgcttacgctgctgttcggccgcgtatactgttccttcatctgcccgctggggattctccaggatattgttttcagaatccgccgctggctggcgccgaagcgtttcctgaaattctcccggcctgtgccgtggatgcggtatggggtgctggcattgctggccgcctgctgcgtgacggggctggccggtctgtctctgaattggctggacccttacagcattttcgggcgcatcatgtatgtgctggcatggccggccgccatttggagcaataacctgctggcggcggacagttcttctgcggacctggttcaaatggattatttccccgcggctttcccggtattgctggcctccgccggcatgctcggcctggtggccgtcatgagcgcctggaaggggcgcctgtattgcaatacggtatgccccgtcggcacgttccttgggttgctttcccgtatctcccttttccggctgggctttgatcccgcctcctgcaaaaaatgcggcaaatgcgtcaaatcctgcaaggcgcaatgcctgaacctgaaggaatacaaaatagactcctcacgttgcgtggcgtgctacgattgcgtgcgctcctgcagtgagggaggaatacgctaccgctggtttaccagggtccgccaacagattccggcccaaaaaaagaaggttcccccggcttccgctccctcttcttccgccgcggttccctccattgccgggagttcccgccgccagttcctggaggctactgcggtcgggctggctgcggccgccttttccggatgccggggagatgccgcccggaagctggaccctacccagtgcgttcttcctcccggagccggttccctggaacgttttctggatatctgcaccggctgccagatgtgcgttgccaactgtcccacccatgtgcttcagccctcatacctgcagcttggcctgaagggattcatgaaaccccggatggattttgccaccaaatattgcctttatgattgccaccgctgtgcggaagtctgccccacgggggccatacgcaggatgcctgttaccgcggaaagggatactgagggaataacaaaagatactacgcgcattgccgtggcccggttttacgtttgccgctgcctggttgcccgggaggacatggattgcggagcctgtacggagcattgccccaccaaggccctttacacggtgccctatatcgggcgtgacggccaggagcaccgcctgcccaggctggatccttccctgtgcatcggctgcggcgcgtgcgaacacgcctgtcccgttaccgcggaacggcctgaggaacgcgaacgccggaactcctgcgatctgtgcgaggaaaaatgcgagttcggaaggcggcgggaaatgcccccccgggcgctggtggtccgtgccgtaaatccccagcagaaagctgttaaaaagtttgaggacaaagctgtggatccggtgggggatgcggattttccgttttaaaaacggctggcggtgtggaagatgatgaaataaacgctcccggaggcttcaaacttccctttcgggagggctgtgtctgtccatccggtttttcgggggaattccgtgcagcccggcttgcggcacggatacggccgcgggggatgccgaaatgagcgggggcaggaggagcctgaccgcgggagcgttcccgcggctggcggggaaggttcccggagagcatgttctccgtttccggcgggatagagtgcaaatgcccgattttccttgatgatgcggaagttgatacgttaaagtaaaagaaccatgttgcaggcgaacggcattacgtatgagatagaaacaccggatggtcctttgaaattattggacaatgtcagttttaatgtccctcgcggtcattttatggcggtcgttggtccttccggctgcggaaagacgaccttattgaaggcgattgcgggcatgattgcggaaacgggcgggcgttttttctggaatggccatgatttggctgaagaagactttgaaccttcggaaatcgggttcgttccccagttcagcattgcctatgaccagctgagcgtggatgagaatgtggagagcgccgccaggctccgttgccggttcaattccgtggacgatttggacgacagcattgacaatgccctggaggtaacgggaatggaggggattacggaccgggatgtgaaaattctttccggcggccagaaaaggcgactggcgctggccatggaactggtatccaatccccggctgctgatttgcgatgaggtgacgtccggactggatcccaggtcggaacacgatatcgtgttcctcctgcatgaaatctcccgttcggaaggccgcatcgtcatttccgtcacgcacagcctttcccatctggacaggtatgattccatcctggtcatgcaccagggctgcgtggcttaccacggttcgccgaaaaccatgctgcattacttcggcgtttcctcgctggaggagatttacccgaagctccaggatcgtgaaggcccttcctggagccggtcctggagcaagcaccgggattcctattattcccgtctggaacaggaaagggaaaagaaaattctttccggggaactgccggatccggatgccgtccgtcttgcggaggcggagaaggagggggcctccggagaatccggaacggaacgggaaaaggccgtggaggaaaacattccggaagttcccggatttttcacccagttcttttgcctgctggggcggcgctggcgcatctttttccgcgaccgttcccagttggttcttcaattggtcatggtgctgctgtttcccgtgctggtagccatgtttacggacaagggctccgggcaaatcgtggggctttccgccacgcaggatgtccagactgtccagaaggatatggaagcccagcagctgaacatgaagacgggatccgccgtctccggcatcatcatgtttgaggtgattctgctggggctgatggggtccaacaatgccgcccgcgaggtggccggcgaacgcgccgtcatggaaaaggaaaagtatgcgggcatgaggccttccgcctacctggcgagcaagctgtcctatctgagcgtcctggtgctggtgcaatccgtctggatgtttgcctttgtggattttttctgggaccgtggcggcggcctgacgcatctgctgttcctgattttggcgaacgccgccatgacttttgtatgcctgggcatttccgccctggcccggagtgcggaccaggcttccctgctgagcatttatctggtgggtttccagcttcctctctccggagcggtgctggcgcttccggaatatgtggaggatttcatacggcccttcatttccgcgtattgggcgtggtccggcagcatctccgccctgaaggacgacgtatatcacgccgtcaagaatgtgctggatacggacctgacgccctccctggtttgttatattgttctgggcgtgcatgttgcgtgcggcattgcggccgcctacgcgggaatccgccgttcgcgctgggagctttaatttaatgcgtgcatttgcgggaagtccgttatatacttcttccatcaaaaattatgtcgagacggcgtgcagcaaaaaagaaaaattcctcatcatccgcactggttttgacggtcggggcggcggtttttgtgctggccgttattgtggggattgtcatgttccgagccggggagaagcctcaggccgggtcggatatacctctggatattctggcggcgaacgcctcccagctttccaataacaactatgcactggacggaacggtgattgaccgttttccgcgcggcgagtccgagcttattgccttcttgtacaaagacgcctccgggcgtgagtgcatcattcccgtctgtgtttctgctgaggccaggaacggactgaacatcaaccgggaccagcaatacaggatagagttccgggtggaagacgtcaatccgaaggtgcgcggcgtgtgcgtagctacatccattcagcctaaataaacaatctccctcgtcctatgaaatgctgttttttgatgaccctggcctgcgcggttcccgccctggggcagatgatgtacaaccctcctgcagccggcggtgcgcctgccgcgtcccctgcctcccctcccgccgttcagccgaatgcctaccagccttccaggcagggagatgccaagtccctgtacggcaatgagcttcctttcctgaaccctcaggacggcacggtgaccatcaacggaacgacgttgaatatgggcagtttccgggagattgaagcgcgtttcaacaaatacctgagccagccggaggagagcacggaagatgcgaaggaatatcagaaaatttttgaaaagctccacgaaacgctctccatgcgcaaggaaaaactggcggcggataatgtggtgcggcaggtagtggacctgttgaccgccgcttccagcaatccgctggacggaggcgtttccgacgctctctgccaagccatttacaccgcgtggcaggccaggagcaatgggaaaaacaaggggaagatgcttgaggcggtggagagggaaatccgcagcaacgcccagaagatgagcctgatggaaagcggcgtgacggcgatttccggtgcaccctccggccagaagggcgggaaaaaggggactccctccaatcatccggcgaaaaataatccccgttacaaatacctggaaaagcgtgtggtggagatggaagcccgcaagctgaagctggagagtgaacaggtgctgacggtgacggaagcgaaagttgttttccagtctacgctggttcaattgtttgcccagcggcgttttgaccatgtttccataggctgcggcgtttacagccgcctgttcaatgacggggataccaagctgcggctggataaaaattccgatgccgccaagatgttcagcggcacgctgggcgctccgcccaccgtcgctattctggacaatctttcccgggagctggcccgtgactccgaccggcacatgaaggccgtgaacaatctggtggattcccgtcattatgtggatgcgctggaacggctgaacgaagcccttctgatcggggaattcatgcctgccgtaaatacgtttccgtatgagaagaagcaaaagctgtatgccttcaagcgggacgtggaaaagttgttcgagctgatgaacggcaaagattatgaagaagccctttccctggtggaggctcttaagaagacttccagggatttcagcacgggccgtgcggaatccgcaatcagcgccgccgtattcgccagtgacgcctatatttcccagggtcaggaagccctggccaggggtgaccgcgccaaactggaggaatgcctgaaaagcgccattgaaatctggccgaaaaacccccgccttcttccgctgcggaacgccatgatggccgcgggtcagcaatcccatgcgctggaggatttcaaacgtttccacaagagtaagaattatcgccgcatctttgacaaccagcatgaatttgccgttctggtgaaggatgatccggagctccagaagcagtttgtggaagatttgggcaaaatggccgttattgagcgtgccctgggcgcggcgcgtcagcgtgaagccatgcaggacgtatacggcgcctgggaggagcttcagcagctgcgttccaaagaccaggagctgttcatcaatgaccaggagctgaatgcccggtatctggacctgacgacaaaggcaagcacgctggtgaatttgctgaatgatgcggaaaaatgcaggaatgagggagaagtggggtccgccctgggcaagtacatggaagctaaaaggctgtatctgtattcccggtttgccaaggagggaattgagtccctgcttgatgaaattttccgttgaactggacggataaattccgccgcatggcgtgcctgtggagacggagtaattgcttttcttccggaacggtgccgttatgctacggctcatgaaggcagtatacctgtgtttgtgcatgctggcggcgttctgttttccggccgcggcgcttccggcggattgcagccaggtgattgtaggttccgcggacgggtggaatagttcccatgtgcagttgagccttttggagaaagggccgcggggctgggtgatggtgaaagggccgtttccggcgcgtctgggaaaatccggtctggtctggggcaggggcgtcagcttccctcccgccggagggccggtgaagaaggagggggacttgcgttctcccgcaggaatttttgaactggggggcgtatatggaactgttcccgcgccgcagaaaaagcgttccatgccgtaccgccgcatcacgccgcgggacatgtgggtggatgaccctgcctctcccctgtataaccagcactttgtgctgaagcatgatcccgtcacgccttgggagttcaagcagcagatgaagctgaatgattacgcccacagtctgaaactgtttatccggcataatgccgcagacggacggcagaaacccgtgccgggtgcgggttcctccatttttttccatatctggcgccgggacggaggagcccctacggccggatgcaccgcaatgagcgaggaaaatttgagggccatgattgcatggctggatccttccagacatcccctttatattctgctccccgccagggaatatttgcgcctgcgcagagcctgggggctgccgtgatattttcagaatccgcctttgcaggcacgcctgttccgccgccccgggacggacaggggtgtggttgaaacactacggatggaagggctggtggatggtgcggctcccgtgccgtgctgcacgttcgttgctgcctggagttccctttcccgtaaatgcaggaagccggcctttcttcaaaggccggcttccgcatggtaaaatggttattgttcctgggactggggagcgggagcttccggctggagcaggggagtggaggtttccttcacttccgccatggaaccctgttcttccctgggtgcgcggtcttcgcggggctgacggggttgttcctggcgttcattggctccgctgaccagcagattgcggcccatgaaaggctggttgtggagaatgtccacggaacggatggcgtcttccatcttcttcatttccacaaaagcataccccttggacttgtgggtgcgggggttgtaaatgatttccacggaattgacttccccgatgcccttgaacacgtcctccagatcgctttccgtagcttcataggaaagattgcccacataaagccggcggttggagacgggctgtttgggtgcggaaacgcgatcctgcctgttgcgggctacgcgggtgttggttttggcggcggctttatccctggccgcatacttgttattcttggacggacgaatgccgaagaggcccaggaaacgctgccacaaggagagtttggcgggcgcttcttttctgtacttgggacggtaaccgctggaatcgcggcggtcattgccataggagcgtccgcccttgttgtagcggcggcgagctccctggccctgtcttccctgtgtgttgtgttgtgacatacttatatgctaagttggtgattatgttggtgtcatgccggatttatcgctgtgtgcagtaaattccatccggaggatcgccgggacgttccgctgccatgagaaaagccaggagtaagggggccccatgccccgatcaacggtccatgcatggtctgataggggggcgatcaggctaggcgcgtgaccagtccggtcgattgacgcgtataccaatgcacagggagccggattcttgcaagccggtatctcgtcattttaggctttctgctcgcccggaggcgggaaggctgtccgggaggcaggcttccgtgccgggcatggctcagagtgagcaaacaatttgacaaaaagacaaggacggagcattttaaatgccggctaatctacatattctctcgatgctgattcaaaatgcagaccgtactacctacgggattaataagattgttgttttcgtccttgcattcgtcgtcttcttcgttgtcggatttgtgtcctggcaatgggatggggtcgctccggaaccgtggcgtctgcggacgctggtgctgacgccgctgacgatgtctctgctgctgtatgtgtgctgtgaccagttcggcgtttactaccgctgccagacgctctgggaaagcatccggcggtttgtggtggcatatgcctgttttgtggtgttaagcgtgatgatatggaagttctttgttcccttttccgcggatgtcggtgtccagtccctggcgtatctgcttaccttcctgggttccctctggctgcgtatcagccggttccgggcggaaaaaaggctggtggaggaagcccctacgctggtggtgggaactccggatcatgtgaaagaattccgcaggacgttggagagcaatcatgtggacttcaggaatgggttgctggtcatggcgcctgaagaggtggacagtgcggtagtcaggaatttgctgattaagaactgcgtcagcaaggtggtgtttctgccggaggaggtggattcttccgtggcgcggtgcctggtggaactgtgcggcaagatgggagtcgatttttacgcgagcatggtggtaagcatgcccgctgtgcataaaacctatttcggcgtgattggaggaacaagaatgctggtgtacaaatccacccccattccctataccacctcctggcagttgaagaaaatgctggactggacgggagcgctggcgcttctggtgggaacgtcacccctgtgggtgctggcggctgtgggaatcaagctgtcggatcgtggcccggtcttttaccgccagaaacgttccgggctgtatggtcgggagtttggcatgtggaagttccgcaccatgtaccgggacgcggataagaggctggatgaagtgaaagccaagtacggcaatgacatggacggccccatctttaagctggagcacgaccctcgcatcttctcctttgggcgcttcctgcgcaaattcagcatcgacgagcttccccagctcattaatgtgctgaagggggaaatgagcctggttggcccgcgcccgctgcccgtttatgagacggaagcctttaccagcgacgcccaccgccgcaggttgagcgtgctgcccggtgtgacggggtactggcagattgccggacgcagcaacatccgggaatttgaaaagctggtggaattggatatgaagtatattgacaactggtccctgtggctggatatcaaactgcttctgaaaaccgtcccggcagtgcttttcgcccgtggggcaaagtagcttccaggtctccctggattgcaggccgtcagccgttattgccgggaatttggaatctggctggggttctctgtccggtggaacaggcccgttttaagaatactgcaattcgggagggggatgaaattggtgtattttgtggaaaatgaagaaaattattgccgggcagagactttaatcttgaggtgcggaaagggatggggcagaatcaatctattatggatttagttcagcgagaaatctctaaagaaacggtgactccgtatttcatcgagtatttcggtcaggcgcctactcatgtggcagcggcaccgggacgtgtgaaccttattggtgagcacacggattataataacggttttgtgatgcctatggcgcttgataaccattgtgttgtggctgtggctccctcccccgtgggcaaacaccgcttttgcggttccctgggtgaccagatccatgaaattgcggtggaagatgccttggttcccggcgaaccgttctggtccaattatgtccgcggcgttttggccaacctgcacaggcgcggcatagaaatcgggcctgtggatatgctgattgacagcaatgtgccccgcggcggcggcctctcctccagtgccgctcttgaagttgccgtctgtacggcgctcgccgcttttgccggcgttgaaatagatcccaaggaagtagccctgatcgggcaggccgtggaacatgaattcgtgaacgttccctgcggcatcatggaccagtttatttctgccaacggcaagaagggcatggctctcaagctggattgcgccacgctggaatatgagctggttccgatgaacaatgagtccgtctccgtgctggttctggacagcgctgtgaagcattccctggcggacggagcttatggacagcgccgcaagcagtgtgaggaagcttcttccatcatgggcgtgccctccctgcgggaagctacgctggagctgttggaatccttcagggaacagcttggcgatgtgcgctatcgccgcgcccgccacgtcattggagaaaatgcgcgcgtgaacgcttttgcgaatgcccttgcccgcggcgattgggatgaggccggtgtagccatgcgcggcagccatgcttccctgcgtgacgactatgaagtttcctgtgctgaggtggatacccttgtttccctttgtgaccgcattccctccgcatcctccatttacggcgcgcgcatgacgggcggcgggtttggcggatgcattgtggccctggtgaagacggaggacgtggaaaaggtggcccaggagcttctggacagctactgccaggaaacgggcattgaaactacgtatcttgtaacccgtgccggagaaggcgcccgtattctgtaccaagcttaatccatactgatgatgaaaacactagcaactatattcggggcgctcgccctgatgacgtggggcgcatccgcccaggaggggcccgtgcctgcaacggcagctgatgcgcagcccgccctggccgctccggccgcgactcccgctgttgaagtccagccggcagcggaaattcagccggcggctcccgctgcagaggctgtacagaccgcctctgcggagcctaaaacggcccctctttccatggtggaagtcattctcttctgcgtggtcgtggtgggcgtaatcgccctgggcatctggaaaagccgtgaccccgaagaaacggaagaggaaaagaaggccaagggcgcttcagactatttcttggccggccgcggtctgacctggtggctggtgggtttttccctgattgccgccaacatttccacggaacagtttgtggggatgtccggcaaatcggccaactgggtgggcatggccatcgccgggtatgaatggctggccgcaatcacgctggtggttgtagccttctgtttccttcccaagctgctgaaaggcggcgtatatacgattcccgaattcctggaataccggtataacacgctggcccgttccctgatggccattgccacgctgctgattctggtaggcgtgccgactgcgggcgtgatttacgccggcgccaaggtgatctccgtgttcttcacgggatactctgccatgggcattgacttcggcaacatcaccgtcggctgcgttatcattgccttctgcgccacggtatacgtgttcgtgggcgggttgaaagcctgcgcctggacggacctgttctggggcgccgccctgattgtgggcggcggcgtggtagcctattttgccctgacggagctcagcggcgcagacccgaaccatttgattcaatccgccgccgccaattccggcgcgacggttgcctccctggggaatccttcggacagcctctggcatggggtgacgcgcttttttgagctgaactccggtgacgcggccagcggtgtaaataccgtgggcggcaagctgcacatgatccgtcctgcggatgatgcggaaatcccgtggacggctctttgcctgggcctgtggattcccaacttcttttactggggcctcaaccagtacatcatgcagcgtacgctggcttccaaatccctggcggaaggtcagatgggcattgtgttcgccgcgttcctcaagctcatcatcccattcgtggtggtggtccccggcatcctggcctataacctgtaccgcaatgacctgaaggaacaggcggaagtaaaatatgcggcggaaatccgtaagacggaagatcccgccgcagtcaagggccgccccgtcatctacaagcttacggacagcttcctggtggaaaacgtggaggaaggctgtgcccatgccattcataacgcggaagtaatgaaggtgggcgaagatgttatggccaatttgaaacaggcctgcgccgatttgaaagcggatgccgccaacgaccagaccacgttagcggaacgtgccccgttcgtggaaaaaatcgcttcccttaacaataaaatcatcaagccggccgtggacaactcggacaactactatctgacggatacgctggtaggctttgactatgactccgccttcggcacgctgatcaggaagttgcttcccggcacgggatggacatggtttgtgcttgcggctctctttggcgcggtggtgtcttccctggcatccatgctgaattccgcgtccaccatctttacgatggatatttacaacaagctgcgcaaaaatgcggggcccacggagctggttaccgtcggcaagattggtttgctggtgtgcgccgtgatcgccctgaccattgctccgttcctggacagcccggcctttggcggcatcttcaatttcattcaggaattccagggcttcctgagcccgggcgccctgtgcgtgttcctcttcggcttctttgtgcccaagtgcccgcgcatcttcggttggctgggtatcgtcattaatgccctcctgtacggaatcctgaaggtgtggcagccggaaatggccttcctgaaccgcatggccgtgtgtttcatcacggtagtggtcatcggcttcatcttcacggcggtgaacgccgcccgcggcggacagcctatcgtgctgcccgacaggggcgtggttgcccttcagtcctcttctcgggctaaaatcttcggatggctcgtggttgccgcgacggtcgccctgtacatcatcttctggtaatccagggaagacctccagtcccgtattttcaatcctcccggttcaggccgggaggatttttcacgtccggaacagaccatgcagctggcgcggctgaatattctggaggcggaaagtcggcagactggcgtttccgggcggcaacggcgccttgtcctctgaataaagttaaagtaaaagacatggttgaaaagaggctggcaaaacgccatgccgcctcttattcctcttccagaagcatgctgcgcagggaatcgaaaaagtttccggattcctcttccgtcgcttccgcgttcatgagatcctcccatttggaatattccatcaggtggggaggaatttcactgaggaaggaggagcgctggcaaggcatgcggtccccgtaacgcaggcgcgtggcgcaataagtaagcatgagtttctcctgggcgcgcgtgatgcctacgtagagcaggcggcgttcttcatcgcaattgccgtcttccagggaacgcttgtggggaaggatgccttcctccagccccacgaggtacactaccggaaattccagtcccttggcggcgtgcatggtaatcaggcatacgcctggcttgttttccacgtcgtcatcgttatcttccttgtccagggtgacctgggccaggtagtcccggagagtttttccgggttgccagaagttgcggagggaggctttcacgtccccgatggacaccagccgtttctggatttcagcttccgttttgcacaggcgcgtgacgtattcgctgaatccggtttcctcaataagctgctccaggatgtctccgaagtcggtttccttatcctggaaaaggtcgatgtattttgcaatcagttcattgaatgcctgcacgctgttgcgggcgcgggtggaaagggccgccaggaattcttcgtcctggagggctgcccagacgctgttgccgtgctcccggctccagtcgatggccagatggctggtcagctcgctgatgccgcgcggcggcgtgttgaggatgcgcagcagatattcgtcagcctgcgggttttcgatagtcgccagataggaaatgaggtcctttacctccttgcggtcgaaaaaactttgcgcgcccaccatgcggtagggaattttatgttcccggagcgtttgttcaatgatgcggctctgggtattggcccggaacagaatggcgaaatcctcccagggccggccttcctgcctgcggacgttttcaatgtccgtgatgatgaattccgcttcttccgcgtctccgggcatggaaatgagccggacggcttctcctccgcctttatgggcgcgcagcgtcttgtccctccggcccaggttatggcggatcagggcattggccgtgtccaggatgggggcggtgcagcggtaattttcttccagtttgatgatggagggatttggaaaaaaacgttcagattccaggatattgctgatctgggccccgcgccagccgtagatggactggtcgtcgtcccccactacgcagacattgtgttccggccccaccagatggcccagcaggctcatttggaggctgttggtatcctggaattcatccactgtgatatagcggaagcgctgttgccacgcctccctgacgtcccggtgctccttcagcaatttgtccgccagaatcagcaggtcgtcaaaatccacggaattctgcgcctgaagttcccgctggtaggaggcggcgatgttggccgtcaggttgtcttcaatggagtcaagtcccagaccgctgtttttcatccggctcatggaggaaagcacatccttgggcgtgattttctccgtaatgccgccgtggcgcacaatcagtcgccggatcaggccgctttgttcggaaccgctgtaaatggtgaaattggtcttgtaccccaggcgccctatatcctctctcaggatgcgcacgcagagggaatggaaagtgctcaccattatttggcgcgccgccttgcgttccaccatctggcctacgcgttcccgcatttccagagcggccttgtttgtgaacgtcacggccaggatgcttttggggctgataccccggtccaccatatgggcgatgcggcaggtgacggtgcgcgttttacccgttccggccccggccaggatcagcacgggcccctgcagggtctgcacggccttcctctgggccgcgttcaggctctccatggaaaaggacttggccatttatacgtcaaaatggatatctttcaaattcgggtggccggcaatgagctgggagatattcatgcgcgtgctgccttcaagctggacgtctgtcaccagcaatcctccgcttccgcaggcgatcaaaagcccctgttctccggcggagagcacctggcccggttttccctccgcttccgggaggatggaaaagccggggaaaattttcatgttgcggatgcgtttcttgcggttccagtagttggtgaaggtcccgggccacgggtcgtacgcccggatcatgcggccgatttcttctgcggggcgcgtccagtcgatttttccgtccgcccgcaggagcttgggggcgtatgttgccaggatttcctgctggcggatgcgtgtagccgttcctttttcaatggaatggatgacgggcagcagcacatccggcgtcatcctggccagcttgtcatgcagggaacctccggtttccgtgccttccaggggggtgctgatctgggcgatgatgtctccggcatccagcttcctgacaatgtgcatgatggtgatgcccgtttctgcatcgccggatttgatggcggactggatgcaggccgctccgcgatggcgcggcaggagggaggcatgggcgttgatgcagcccatgggggccatatcaatcacttcctggctcagaatctgcccgtacgccatgacgacgattagatccggattcagtctcctgaggttgctcagcgcatccgggctgcgcagggaatgcggctggagcacgggaatgcccgcttccctggcaatatttttgatggccggggctgtaagcacctggtgcctgccgacagggcggtcgggttgcgtgaccaggcctgccagatccgaatgacggatcaggctgcggaaggcgggaatggcaatgtcgcctgtgcccatgaagacgatgcgcatggctggaagcttgccctgacggcctgcgcaggtcaatgttaaatccggttttgagaagggaatcatagggaagaaaggccgttttttcccgttcctttccgtccggagggaataccggaggataatgtttttccggccgcttcccctcatgtctgccctcctgcaagaagttcttttcgatggagcggaatattggtataccctgttctatgcagaaaggacggctgccgcgcattctgattgtgaccgcaggatacggggaagggcacaattccgccgccaggggcgtgagggatgctctcgcagggcgcgcggaagtcctcgttacggacctgtgcgcggaggcgatgccccggatgtttggcctgacgcgcgccgcctacctgtggatgatttcccgcatgccccgcctctggaaactgatgtatgaggtgagcgacaggcgcaatatggcggaaaagcccgtcaggggaatcgcccccgtggagcgcctgctggaacgtttgctgcgggaatggaagccggatgccgtggtctgcacctacatggtatatccctacatgctggattccctggcctcctgcacgggcagggcggttccctacctgaccgtcgtgacggattccttcgtcatcaataaatcatggctgtgttccaagtcccctctctgggccgtaacggatccctggacgagggccatcatggaggaaaaggggctgccgcaggacaggctgcgcgttacgggatttcccgtcaatcccgtgctgggggcgttggcgaaggagcatcctctttcctggaaggaaggggagccgttccgggtgctttactttgcccagcgttccgcacggcatgcgcgggcggagctggcgggtatgctggatgcgaatcccgccctgcatgtaacctgtattctggggcgccggttccggcgcatttatccccgcatccgggatttgcgagccagatacggacgcaggctgacggtgcgcggctggacgcgccgcgtgccttcctatcttgccgccagccatgtagtggtcgggaaagcgggaggcgccaccgtgcacgaagtgcttgcggccgcacggcccatgctggtgaactttcttcttccgggccaggaggagggcaatacccgccttctggaaaaactgggcggcggcggccatgtgccggatgtccgcgccctggcttccgctcttcaggaaatgatggcggacggcggcgcgcagtggaggcgcatgcatgaaaacctgctgcgggcggggatgaccggaggaagcggcagaatagcggatttggccttgaaactggcggaggaacatactaactgattcccgtgacctatcttctgattgacaattccaacacgcgcaccaagttcgtgctttcttcgccggaagccctgttgccggagcggtatatgattcccacccgggaggtgagcggggagcggctggacgaggtgctggccggcgtccgttatgatgccgccgtggtgtgttccgttgtgccgcgcgtggcggaagagctgaaaaactggatcgtcaaaccgtgccatttcctttcctgcgattcccggctgggcgtgggcatcgactatccccacccgcgccagataggggccgacaggctggcgaacgccgtaggcgccgcggcttattacgggtatccgtgcgttgtggtggacttcggcaccgccgtgacttttgacgtgatcggtccccaatgcacctatgtgggcggcgtcattgccccggggcttgccagcatgggggattacctggagcgcaatacggcgcttcttcccgccattgacccccaggagccgtcccgcgtcattggaaccagcacagtagaggccatgcaatccggcgccgtgtacggttaccgggggctggtgaaggaaattctggcccggctggaaggtgagctgggcgtgcgtccggccgtggttgctacgggaggggatgcagcgctgatcgccaggggcgtggagcgcattgaccatgtggaccctgacattacgttgaacggcttgcgcatagccgccgggctgaatctttaaagaacggccaaaatcggctggaaacctgctgcttccggcgccgtggccggatgacgcgtaaaaactcataaataggtgttgcaaatggcgcataccccatgtaatatcaatgaaccttaacaataaatatcatgtctgacaacagcatcgaagaaaaagtaagaagtatcatcgtcgaccaacttggcgttgaatccgataaagtgactgctgatgcgaaattcatcgaggatctcggtgctgattcgctggataccgttgaactcgtgatggctttcgaagaaaactttgacattgaagtgcccgatgaagaagctgaaaagcttcagtctgtggccgacgtcgttgcttacatcgaaaaggttcagggttaagttaaactgctaaaaatcctttattacaaaagcggcttccctgtccaaggcaaggaagccgctttttcatggaaagcccctctgccttttcttccatgagcgacctgccttccttttcccgtgacgatatccgctatgcggcggagatgacgcgggtggtgtatgaaccggaccgccgcattgatacttttggcgataccaggtttaattttcttctcctcagtgaactgatggatgaggtgaacgtggtgcgcgtgcgcagcggctgggtggaagcggagaaaccgaaaatcatacggccttccatttacaatgaaatcagtacggagggattttccggagaagccaagcgcttttttgactggctctccaaaaacggcccgggctttctgacgctgctggaatacggattcagattcaaaaggtcggaagtgagcgaggaaattctgcatgaaccgcttgattccgtgcgtggccggctgctggaccaggtgcgcaatggagaggatacgttcatggctctcattgagggagtggatgacgcatgggaggtctccctcttgaaattcacggtggaaatgatacaaaaatcccatgaaatcaatatctttgacttcaagcgcaaaggtcttctttagccttctgacggcggctttctgtgcccagggaattttggcggacggagaaaattattccctctggccgcgccgtccggaggcccttgcagaggcccgccgcctgatggaccgcggcagcctgccgaaagctctggaactgttgcagcctctggcggaacagggcggcgtggtggggaaagaggcgaaggaactcatcgggaggctgcgcatccgccagttgctggatcccaatgggccggatgtgaagaaatataccgtgcggaagggagattcctggatacgcatggtcagaaaactgggttgctctcaggccatggtggttcacctgaacggtttgatggatattcccgctcttcatgcgggagatgtattcaagtatcggcctctggatttccatgtggtggtgaacgtgccggaaaaggaaatctgcctttacgacgggacggattttgtcaagggataccccatcctctccatgaaggacggggggaaaaagaatgtggaaacgaccgtaaaggatgagcaggcccccgtgtccatctacagcaggcagtttccttctgcggataagacgctggtgctggcggcgggaggctatgtcattgacgctgctcgcggtacgccccgctcgcctgggttttatctgagccggcaggactgcaatgaactggccatgctgactaggccgggaacgaaggtgactatcctgagggggaaaggagaggaaccgtgaggctggttattcagcgtgtcagtaaggccgccgttcatatcggcggtgtttgtgcgggggccgtggggcccggtctgctgattctggcgggcattgaagaggaggatacggaagaagatgtgcgctggcttgccaacaaggcggcggccatgcgcattttttccgacgcggacggaaaaatgaatctttccgtaagggaggtgggtggaagcgcgttggtggtgagccagtttacgctgcatgcctccacccggaaagggaacaggccctctttcatccgcgccgcgaggcctgagcgggccattcccctgtatgagctgtttaagaaggaactggcgtctttgctggaaggcagggtggaaagcggtgaattcggagcggatatgcaggtttccctgattaacgacggtccggtgaccattttcatggactccaggaaaagagagtgatgggaagggtctttatgaacaccatcaaaaaggcttatatagttagctttaccccgatctcctgcttgctctctattttcgtatgaacatagaaagtattgatgataaatctgttgctcctcctgaagatctgtccttgaaaaaggaggaatattacatttacgtagattcgaacctggccctgaaatagctaaggccggacgctcctctggctggtcgatatttcccgtggaagccgcctgtccatagggcgagtaatcgtaagccgctgcgacatttccctgtgcgtcgaacacctccgtcacattcttgttgaagtccatgccatagcagtaaagggaagcgtcctgcgcgagggccagggggcgcgtggctgtcggttccagaggatcccacaacagcgtgcggagcacgttccggctgttgagcatgtccagggcggctacttgctatatctttgtcccatgtaggcttagcggttttccttcatcatcttgctatgaaaaaacgaagtatttatttatcagaatttctgtattcaggtaatggatatttaaaatgaaatatagttaatgatgagttttctgttgtattttttttgttttaatatttcaaagagaaatttaattattttgtttataaataataataataacagcagtagtaatcctataaaaatgcctaaaattattccgtgctcaaaacaaattatgaatgtaatcaaaacaataggaatgcaacctataatgatagatatagtactaaaaataaaagatatatctgaatcttttatatatagacatgaaaagggatgataaataaattaataaaaaacaaaatattagaggcataattgaaataatttttaaattgtttttctttttatgaattttgtatcttgagatgaaagttctttaaacgatacaaagatcattcctttagcactactgctagataatagtgcgccaaaacagtctaaaccataagattgcattaaatatgtgttatctattaatttaattactttatttttgtcgtgtccattatccgttgtaatgaaatctccaactttaatttcttctcctgaaaaataatttgccataatttttttatttgatgacttcaattcctcctccagtaggtcgacctgtatattcaggataattgggattgtttgaaatggtagttcgtttatcgaaacatcggcaaccagctactatgggagactgattaactgtaaaaatatgataatgaggattctagccgttgtgtgtatggtttctgtgacattgctgccgttgagatcccacaggtggattacatactttacattttaatttatatcctccttctattaaagcagtaactagtgcagtggtcgttgagtatccgagcaaagtagctacctcagatatttttcctgcagcaagtccttgaataacagtatttgaaagtgaatctaatgcttataatccaaacgtatcgaatttatcttgagtgctgttaccgaggaaggcatacaaattccatcctccctgttcagcgatggggtcacggttgatccaccctccgtctctggggttgtaatagcggtaattgtaataaatcagggcgaaatcttcgtcgtgcatctcggcggaccactggacgggctggacgaggtctcccgtggaatccgcctgtccatagggcgagtaatcgtaagccgctgcgacatttccctgcgcgtcgaacacctccgtcacattcttgttgaagtccatgccatagcagtaaagggaagcgtcctacgcgagggccagggggcgcgtggctgtcggttccagaggatcccacaacagcgtgcggagcacgttccggttgttgagcatgtccagggcggctacttgctatatctttgtcccatgtaggcttagcggctttccttcatcatcttgctatgaaaaaacgaagtatttatttatcagaatttctgtattcaggtaatggatatttaaaacaagctatagtcaacaatacatctttaataggagcctttatagatattgtattttcaaataatccgtacattaaatatttgtgaatatagccgcttgataaatgaaatacagcaaaattaatttcattttttctatgaaatttatttatttctttcactttggaaattcctttttcagaaagatttataataagaataacatttttaggatctttctcatcatttttgtaagacatttccacaatatcttcattaaataaatttacaggagaatggttgataaagcttaatgaaggaggaaaacctgtggcgtagacaggaatcaatgcggattgattattgatgatttcattctctagaaaaatagaaatatttgtatttttaattatgttatcgttcgatttattgttttctatattttctcctttccatctcaatagaattctagttttttctaatttatcattttctgattctactgatagcttgactccaaaaataaattctaacctttttgtaataattttttgaatattatcagaaattatttttgggacgtaaacttcataaattatattattttcttttgcatttaagttaaaaggaagaataataaataaaataataaataaaattttcataaattaatttcaattactttttaatagaaggaatatacattgtttccattttgtatttaggtgataaacaggttattggggttctgccatatttttgttctaattctttcagttcattacagtttttgcaaataaaatttccctgtatattatttataaaataaatatgttgttttaatatacagtaataaataacacaacaattttcactagcgactttctctttggcatcacattgatttaatcctacgttacgagtagcatttattgcagccgatttaattgcattatttatggctccagcagaaccaggcggaaattgtctgccgagtatatctgtttttaaaatgggcgtattcccaacaaacgcataaagattccatccttcctgttcggcgataggatcgcgattgaacctccttccgtctctggggttgtaatagcggtaattataataaacctgggcgagatcatcgtcgtgcatctcggcggaccactggacgggctggacgaggtctcccgtggaagccgcctgtccatagggcgagtaggcgagttccccgaccggttcctgcgccgtcttgcggttaccgatattgtcgtagctgtaaccgtaggagggacggcaattctggtcatcatagcttacgttgcgggaggccagcatgatttctcgcggagaagcaatttcatcatatacaaattcttcttgatgcaaatcaatctacgttattgtttaatttttttcggaattatgcagaatagtcttgtcgcaagattttcagaatattttaaatattgatatttagcaaattgcttcgataaaaaatcggaaaaatcaacgaaacaagactaaagtaaataataccgattatttttcaaaagaaagtgttggtaaaataagattcaataaattcagagattaggtattagtatcattttctcctcatctcaaagaaacctaatacaaattttattactaacacggcaattttataaatttattttaataaaatagctaaataaaattcttgattttttgtgtttttttgcaattaaatttcaaaatttaaagtgccggcccattttattagtatattcagctgtgggtttgtatatatgctataatcattaaatttttctagagccaatgcagccgaatcagcaactaaaacaatatcttttttattcatatattcattccaggaaaaaatcatgatagccggtagataataatgtaatccggatatggaaagccagaaaggaaatgtgtaatgattttgtagataattcgattctattaacgtccattccttaccttccaacagaataagttcttcatatgattcttcgctagatattttataaccatataccaaatcaaaggaaggaatagggtatataggaaatgcggcttttacttctttaaaaaaatcatccattacactttatttttatttttctttgacaattgattacgtttgtccaagcttgttcagatgctttccggtgtcctgaatctcctccttggtaacatttggagttaatagtatctcgagcaattgcattttttagccaagttgcagccttgattttcaacagccaacaacaatctgtgtccttacatttacccagtaatgctgtctctattttggctgcattaacagcactttgtaacatcccatgaaataaacgggtacaatttccagttcctggacctggctgtgataaatcataagcacctgcagaaactattacaattgctcctattacatcaccaattggaagaagcccatctacggctgcagctcctgcggcaaaaggaacagctcttgccatagcattttgaccattaatatcaaaactatcaatagggttattccctacgaacgaatacgaattccatcctccctgttcagcgatggggtcacggttgatccacctgccgtctctggggttgtaatagcggtaattgtaataaaccagggcgagatcatcgtcgtgcatctcggcggaccactggacgggctggacgagtcttccggtgcgggtggctgttccatagggggagtagtcgtaaattgccgcaacagctccctctctatcgaagacctccgacacattcttgttgaagtccacgccgtagcagtacagggaagcgtcctgcaccagggccagggggcgggtggccaccggttccagagggtcccacagcagtgtccggagcacgttccggttgtccagcatatccaatgccgctatttgtaaatagccgcggtacaggtaccgttcgtggctggcgaccgtgccgttttgggtgactttcttcatgtagcggcgtcccaggtagtcgtagccgcattccacgactgtcgcgccgtcccggctggtgaagctcaccgcgcggttggccgcgttgtagaccacggtccacacgcccgttgacgtcttgatgagggtctggttgcccgaggcgtcgtacgtcggcacaaaaggcgcttccccgctttcttcaatgccggtgtactggttgagcccgttggccgcgtaggcgagttcttgggccggttcctgcgccgtcttgcggttgccgatgttgtcgtagctgtagccgtagggggcggcgcccagggcagcgccggtgagctcgtttctgccgttgtagctgaagctgtcgctgtgtgcaggctccgttccccgccgctgggtgcgggtgaccgggcgttccagagcgtcgcatctctgggtccgggagaccagcacggtttcccccaggcggcagtctatgccgctgagcaaatcacgtcgctgttcgtaagaaagttcccggacgatgccgtcgggcatcgcgaggctggagagcaggctgcttcccgccaggtagccgtaggcgaagcgttgctccgttcccccgtgcctgattccggcgctggccagccgcccgtcggcttcatagccctggctgacttcctggaggacaccggttccctgtttcagggtatagccggaggagcgtccgtaagtgtcgtagtgttcctggagctggcaggagactccttcgatggtaatggcgtcggtgtccggttcgttgcagggggtgtacgtgagcacgcgcgtaccggaagcgtccgtgacctgggtcagctggttgaggtggttgtaggcatactggatgccgggcgtggagtcgctgtaggagacggagttgttgacccccttcttcaagttgtagccccaggtggtgaccaccccccgcgcgtccgtcagcgtggagcggagattcagggcgttgtaggttgtgtcctcatgcgtcccgtccgcccaggttttgcggatgagcaggcccgtggcgtcatcgtagctccacgtggtgacgtctccgtccgtgcgccctgtaggatccgtggtaatgtcgccggcgtcctcccggaacgtggtgaggctggtcatcctgtccgcttcgtcataggcgaagagcaggggctgggtccccgttccccattgcgccgtgttgcggccccggaggtcgtagccgtagcaggtcgtgttgcccagggcgttggtgacgacggcaggctggtcaaaccaggggccgtaggcggtagaagtcgtgttgcccgccgcgtccgtcaccgaaacggtgcgcccggcgatatcggttttcgtcgtggtcgtgttgccccggccgtccgtattggcgtagatgacgccggtttccgtgtaggcgcgggtctgcgtggccgtgacgcccgcatggtccgtctgcgtggtggtgaacccgtcaatgaccgtggccgttgctatgacattggaagtgggaatgctgcttttctgcgtccggacggcgcccgggccgtattcgctccattgttcggaagcgtttcccctggggtcgatggaaatgactttgctttccagcgtgggcgagagggaagaaagaagcgttttctgcgtttcgtcgcaggtcgttccccggccgttgttcctggtcgccgtgacgacctggtacacgccgtcttccgcctgttccgcgccgtagctccacgtggtgatgcgcgagttggacacggtggccggatcggccaacttccaggtttctttcgttctgttgccgaaggcgtcgtattcccacagggtcggggccatcgccgtggccgcgttgcccgcgtccgcctgttccttgaccagctgccccttggcgttgtaggtgcgcctcgtgtaaatgactccgccgacggtgttggggatgcccgtgcgcagggtttccccggctccgttgacaatgctgcgctgcagctcggtttgcgtttccccggacacggctttcgtgaaggtccgcacgccgtcattgaccaggtcgatggcgtagatgacgtgccgctgccccgtgccggattcttccatcaccgttccgtccggcgcgctgcgcgtgacgaacgtggctccggagggggcggtccgcgtcgccgtcaggccgtccccgctgtaggcgtaggcggtgacccggcccaggacatccgtaacggatacggttcttcccagcaggtcgtagatggcgctttcctgcgtggtcatcgcccccgtgtcccggcgcgtggagagcacgcgccctgccgcatcccgggcgtaggtggtgatggtttccggcgtgatgacggtttccccgtccatcacggcggaacgcgtgacttccaccagttggcgcgccgtgtcgtaggcgtagtccgtcctgatgccgttttcatcgatttcccacagcaggcctccgtcgcacatcagttcgcgttccgtgagccggccgttgcccgccgtccgcttcacccaccggttctgcgtgtcaaattcgtagacggcgctgcccgtgagcgcccattgcccggtggaaagcaggaggtagttttcttccctgacgcgctgcccttccgccgtgatccaggtgacggcgcgcgtgctttgtcccggcacggcttctccgttgatgcgcgtttccaccgtttccgtgtagagggcgccgtgctccgtcgtggccgcgtagtcgtgccacgtttgcacgccgtcgaggtcccggctgaaccgcgtgcgtccgcgggcatggatgttggcggctccggccagccattgttcctccgccgtcaggcgcgtgcccgccacacccaggcccgtgacccgccgttccgttcttttgatgtggttggccgtcgtgtatttccaggtggtggatgtcagcgttttgacgtgtccttccagcggaagcaggtctgccgtttccgtggcgggttcgttgctgaagtcggcttctcccgaacaggcataggtgtagcgcgtgatgcgcctgccgctttccgcccacggttcgtcccggctgagcaggcggccgtagaggtcataggcgtcatgagtctggctgccgtccggggccgtttccgttctgagccgtccgcactggtcgtaggcgtattgcgtggtttgctcctccgggcttccgtagccttccgccagcgtgagcagcaggtcgcccacgtccgtggtctggtagatggcgcaggtgcgcgccgccacgattccgtttttggagatttccgtgaccagctgccagaccgagttttccggttccagctccgtgcgcgtgcggagggtcgtgagggcgtcttcccccgtgccctgccgcatgttccacgccaggccgtcgttccaccaggtgacggcgtagggctgcctggcaggcgcctgttccgtgatggtgaacttttcctcagcatccagggaaagaataaatgttttcaagggagcgcccgtaacggtataaaatccctgttcgtccgttccggtgatttgcccaggggtatagagcgcgatgacgtagcccgtggagatgacgttttccacgttgagcaggccgtcccacaggttccagatttgcctcagcgagccgtctccggcatgcctgacgtccagataggatgacgcgttggagatgacctgcctgtccgccgtggtgtaggagaggagcgttcccgtttccgccgagaagaggtattggctgccgtcttccaccacccagcgcaggcaggattgtccttccaccgtggccagcgccgcacgccctccgcccgacgtgtccaccccgatgggcagcacggacccgtccgtgtagcagcgcatggcaattacccggtctccctgcaccagattaaaccgtgctccggggacaatgcccccttccggcacgtccagacggctgttcaggggatggttgtaggccagtgaggagggtctttccaggccggagacgttttgttcacccctcagttccacccttccggccggaaggcccccaagtccacggaacgctccgaagttgcaggaccagtacatcagcgtggccgtgctttccgccgtcacgctgcaccccgccgagctgtagtttcccagggcgccgctttccatgcccgcctcagggcccgaccgggactgcggcggggagggcggcgttccgccgctgttgtcgcacgtgtctccctcgcagggacacggttcgggttctttcctgccccccggttccgtcggcaccacgtcgatgctgtagttgcagatggaggtgttgccgcttgccggattgtagtcgatgttggtctggctgacttcccagctgtaggtgccggaggggagctgcgccccgccggtccccgtgtggtatttgtgcccgccctgttcgcccgccgtctgcgggttttccttcagatccacctgcgccaccacgttgccgccggagtcctttacctccaggcttccccagtcgtccaccccaaggaagagcgagcaggtgccgtagagttttttgccctccgctccttccgggatggtgaatgtcccgtgcgcactgtacccgtccgccgacgtgctcggcggtcccacagtgatttcagcgtgttcgtggatttcttcaaatggcagcgggtcgggctccggagctgcctccatgccccgcctgccggggctgccgccggctccaaagtaccatttccggtagccgggaacggcagaacgatggacggaggaggaacgatgaggcggattcatcaggtattcaagagtcgggggtaatgaaggaagcgaggggggccgccctttcctgatcgttttatcaatagtatgatctgaagtcggtgtcgatagaattttatttgtatgtttttgattttttataaaagatggtcattattttacacgaaaagataatattataattcttacgttcagtgcattcccttaatagacatcaatgttgtctgtttgttagaaaatgtccctgatagatggcctctcttcctggccactgtcaaatttcccggaagaggctatctggtattttattcctggctcaaggaaacccggtaataaaaaaactcccgacagccgaggccgccgggagtttttgtagagcgtcttaagaaggagtcctctttagaagcagaggccttccttggcattggcccgcatgaagtcgcggttgaggcgggcgatgttgtccacgctgatgcctttcgggcaggcggcttcgcattcgtattggttcgtgcagttgccgaagccttccgcttccatctgcttcatcatggccaggacgcgcttggagcgttccggctggccctgcggcagcagattgagatgggcgattttggcggacgtgaacagcatggcggaggagtttttgcaggaggccacgcaggcgccgcagccgatgcaggcggcggcgtcaaaggcggcgtccgccttcactttttccacggcgatgttgttggcgttcggcgcggagccggtgcgcacgtcaatgtagccgccggcggcgatgatgcggtccagggcggaacggtccaccatcaggtcccgcaggatcgggaaagccttcgcgcggaagggttcgatccagacggtgtcgccgtccttgaacttgcgcatgtgaagctggcaggtggttacctggcgttccggcccgtggggaatgccgttgatggtcagggagcacatgccgcagatgccttcccggcagtcgtggtcaaaatggatgggttccttgccttccttgaccaggccttcattgacgatgtccagcatttccaggaaggaggcatccaccggaatgtccttggcggcataggtctcaatgcggcccttggcgtcacggttttcctggcgccagaccttgagagtgagattgagtgttttagccatgttataatctttcttttaagtgttaatgtattggctatctttacttgtagctgcggatggcaaggtgcacgttctcgaaggtcagcggttccttgtggagaacaggcaggctgtccacgccggtgtattcccaggcggctacgtaggcgtattcatcgtcgttgcgcttggcttcgccgtccggcagctggtattccacgcggaagtgcgcgccgcaggattcctgacggttcagggcgtcatagcagagcagctgggcgaattccaggaagtcagccacgcggcaggctttttccagttccgcgttgatgccgtccgccgtgccggttacgcgcacgttttcccagaattccttgcggagctggggaatgcgttcaatggcgtgggtcaggctttcttccgtgcgggccatgccgcagtcttcccacatgatgaggcccagttcccggtggaaggagtccaccgtcttggtgcctttcacgttcaggagtttgttgatgcgttccttcacctcgtcttccgcggccttgaattccggggaggcggtggtgacggagcccggcttggtggtcgtcaggtaggcgggaagcgtggctgggatgacgaagtacccgtcagacaggccctgcatcagggcggaggctcccaggcggttggcgccgtggtcggagaaattggcttcaccgaggacgtgcagccccttcacgttggacatgaggttgtaatccacccacaggccgcccatggtgtagtgggaggcggggtagatcatcatgggcgtttcatgggggtcgtcgtccgtgatttcttcgtacatgtcaaacaggttgccgtactggccgtcaatccattcgcggcccatgcgcttgatttcatccgcaaagtccaggaagactcccttgccggtgatggccacgccgcggccgtcgtcgcaggcttccttggcggcgcgggaggaaatgtcgcgcggagccaggttgccgaaggagggatatttgcgttccaggtagtagtcccgttcttcttcgggaacatcggaaggcttgatttcctttttgcggattttttccgcggtttcacgggacttgggcacccagatgcggccgctgttgcggagggattccgacatcagcgtcagcttggactggtagtcgcccttgaccggaatgcaggtggggtgaatttgcgtgaagcaggggttggcgaagaaagcgccgcgcttgtaggccttgtaggcggcggtgacgttgcagcccatcgcgttggtggacaggaagaacacgttgccgtagccgcccgtgcagagcaggacggtatcccctgcgtaggacttgatttcaccggtgaccagattgcgggtgacgatgcccttggcttctccgtccaccagcaccaggtccatcatttcatggcgggagaacatttcaatgtgtcccttggccacttccttttccaaagcctggtaggcacccagcaggagctgctggcccgtctgtccgcgtgcgtagaaggtacgcttaagctgggcgccgccgaaggagcggttatccaggaggccgccgtattcacggccgaagggaacgccctgggccacgcactggtcaatgatgttggaggagacttccgccaggcggtaaacgttggcttcacgggcgcggaagtcgccgcccttgacggtgtcgtaaaacaggcggtaaacggagtcgccgtcgttctggtagttcttggccgcgttgatgccgccctgggccgcaatggagtgggcgcggcgggggctgtcctgatagcagaagcatttgacattgtagccaagttcggcaagcgtggcggcagcggaggcgccagccaggccggaacctaccacaagcaccgtgtacttgcgcttgttgttcggattgatcagtttggattcaagcttgtacttggaccatttgtcctgaatagggccggagggaattttggcatccggcatccagtcgcttacgggaaaattaatcatggctttgagaggagttgatggttatttgatgatacccagaagaaccgagaccggcacggagatgaagcccaggcagataatcgcgccgtaggcgatggcgataaaattgtagaagggccggattttgcgggaatcaatgcccacagtctggaagatggactgcaccccgtggcgcagatggctgaacagcatcagaacggccaggatgtagaaggcggagcaccatacgttggagaatccggtcacgatcattttgtacacgtcaaaggtttccaccgtaccgtcggaaatgaaggtggtgaactgggcggggtcgtatcccacgcgcagggtgtattggtacaggtggtagaccaggaacaccaggacggtcaggccggtgtaaatcatgtagcgggaggagagcgtcgccttgatggtgttcttgaacacatagggttcgcgggccgcatggttttccagcttcagctggatggtcagccagacatggatgatgaagatcaccccaagccccgcgcgaatgccccagagggctgcttccggcatggagtgcaggccgtgggcgtaggtgttgatccattcagggcctccgaagatgagaaggttgcctgccaggtgtcccgcaaggaacaagaccaaacataaccccgtcagagccacaatgattttgcggccgatggaggatgtcacgaatgtacatatggtttttactagtgcattcataggcgctctaatgaaataaatgcgtcctcacaggatgcccggttcaagcccggatggcaagcctcttcttgaatttccggcgcttttcggatttttgaaaagccggggaaaggcgttgctgtttatcagtttggaatagttattattttgttacctgttccggcttgacgaggctttccgcacaggcgtatcgtctgtgcgtgaaaaggagtaaaaaagaggtgctggacgcggatttcgcagcggcgcgcgccggcgttctggatgtggccgcatttctggaccgggtggaccgcggggaaggagaggcggatttccgctaccgtgccctgatggaggttcttccccttttgtccgcatccggccccggacgcgtccgggccattctggaagccctttcctacagggatggcaccgtgccggaaaccgccgcagccaaagcggcctgcggagccccgaacctcagcaaataagaatgatggctttcatagaacctcatatacatatggtgtgccgcaccacggacgaataccgggccatggcgcaggccggctgcctggcggtaggggaaccggcgttctgggccggttacgaccgttcgtccgcggacggtttccgggattatttcgtacagcttacggaatgcgaacccgccagggcggccaagttcggcatggaccattacacatggttgtgcatcaatcccaaagaggcgcaagacgtggcctttgcacgggaggtgatgaaactcattccggagtttattgaccggcccaatgtccttggcatcggggaaatagggctgaaccggaatacttcccatgaaatgaccatttttgaagagcatctggatctggcggtgcgcctcaaccagcttgtgctgattcacactccccatttggaagacaagctgaaggggaccgtaatgattctttccgccctgaaaaaccgtccggatctggatccttgccgcgtgttggtggatcactgtgaggaacataccttcccgctggtgaaggaggccggctactgggccggactgaccctttatcccaccagcaagctgaatcccaagcgggcggcggatattctggaattgtacggaatggaccgtgtctgggccaattccgcggcagactggggggattccgatcccctggcgctgacggctctggcctgcgagctacgcaggcgcggtttttcccggcaggaaacggaacgtcttctcttggaaaatccggagacattcatgggacagtctccgaagttccggaaagtgtcgtcccgctaattccgcccgaggcgcggcggagggtacggccctctagtccccgtccgggaaaaagacggtgaggacggcgcccaggatgaccgccgcgtcatccagaaggcccagcctgccgattccgtcaaacaggaattcgtcgggagtcaggatgtaggcgccggcggcggccagaaggcatatattccgtttgttgaaaaaacgcggttctccttttctgcttttgaaataccggaacaggcgcagtagcagctgctgtttttgaaggttcatggacgggaacgggggataaaggttcaagctcagccattttcctactccttttccctgtttcggggaaggagtctgttgccgacggacggaaaccgcagcgatccggaccgtgcggggaaatggattgctgaaaggatgggctgttccggatgctgagggaagccgggctttgcatgctccggttccggctgtcccggcatgggaaaaaggggcgtgtacggaagtggggcggggccggaagctcttgaaatgaccctaccgggggagactgaatgccatttttccgtcaagtgctggccgtgaggttgccgcagcaaatggaagcttcttcccctctgttttttccggcagatgtttgaacggataaggaaaaggccggctcacgattttgtgagccggcctttgaatatagggaggcggacggtacaggcttatgccctgcggcggcgcatcatcagcgcggtcaggcccagcaggcccagggaagccgtggcgggttccggaatgctggcgatttcactcatcagttgaccaacttgttcctgggaaaggagggagtcgtggatgtagagctgttcgatggattcagccagtcctgcgtccatgagaatctgctcaatttgctggttgccgaatttcaggtcgctgttggaatagtacgtagcgctgtcgccaaaatagatgcgggtgccaagatctccggtgactacggaaatggtcagggacccttccgtgcccagcggggtgtcaacgacgggcccgatgtatgaggtgttggtccataatccctggagtttccggtccgtgttcaggcccacgccccagcttacactgctgtttttggcgttaaacagagcggtataggtctccggagtgttgattttggacagatcaagaaccatcgtcacagacataacgtcgcggttgttggtaccgtatccgttgaaggttatcccggataacgtcagattgctgtcgtcagacgtgatggaaacggaatctttcagggtgccgaaatccgccgtttgggaggtaaagtccgaatatcccacgatagagctatctagcagagtggtattcgcggtggcgctcaggctcatgccggccgaaagaatcagggtggataataatttcttcatggtcagtatcttaataaaatgatgcaagattcaatgtatgcacttgcgcttgaataacgaattacaaattcgctacaagttgccatccaaaaggaatcatcaatatgagaaaaacactgacatttttaatcgcgatgggaagctttgctgtttcctcggaggcagcgaccgtttttaattattacactcccggtacagataattacaatagtaccatccatgggttttatcttggcctggggtcttcttccctggctccttccgattcctcttctccctcttccctgtccggagagatcagactggacagttttacgctgcgcggagccgccaacaatttgggcgctaatgtcacttacggcttcctggtgctgaatggctccgacaattcggtcatcggctggagcaccaatacgggaactactgcagcagggattaatctgacgttcagtttttcttccctggatggttctcccctgcttcttgacgcggcattgacataccgtttcctggccgtgagccagtccgtgatggacttgatgcaggatacgtctaaaacgtatttatatgctgcggggggaacagccgcccctactgctaacacggaaggagataccgtaacgatcagcggcggattgactgctcccggcatccgcggccattatgacgccgagggagcgcctggtgattctgtcgttattacgggagccaacggaaccaatactttcagcttattatccccgattttcacggaaatccgaggggaaatggtgccggaaccagccacggtttccctgggcctgctgggactggccgcgctgatgatgcgccgccgcagggcttgagccttctgatggcggaaaatcggcggatgagagctgttcttgcggaacagctcttgttttttatatccagagaggaagaattgcttatccgcgtgcggggttcataccctccggaaggtacgggatttccggggtcagaggggcgtatccggttttttccgcatggcggcaatttgctggaaacgtttttgtgagggagtaccggaaagttttttctttgccggaaaatgccggtcaaattcggcagcgcgcttttcgtccatatggtacacggcagcttccacatagcggcctttcaggccggacagggaatctctttgcaattcacaggcctggagagccgccgcgcacatattgtccgccgttctgattcccagcgtttccgcgggaacgaatccgcagcgtgaatagtagtccgggtcgccgtacaggaaaatggcgcggaagcccatttcacgcgcccggtctttggtgtagccgatcatccgccgccctattccccggcgctggtattccggaagaacggcaatgggccccatgcccagcacttcgtattcttttccgtcatctgtcctgatgacggatgctgcataaacaatgttcccgacaatgcggccgccgtggacggcgactacatccagctccgggatgaaggaaggactgccgcgcatgatatggagcaggtaatgttcattgcagccggggacgtaatagttccagaacgcttctctcgtgacatgttccgttccggcatagtctgcgggttgtgctgttcttaatgcaatgatcatgaaaggttgttctttacggctcccccctggagaaattccagaggcggtgcatcgtcataacgtccggaatgttcatggggcgcactacgcggaacccgatcatgcctccgtccgtcaggtaccagatgcttttagggttttgggggtcctggcggttccaggcgggggtgctggcacgacgcgccgcgcttcgcaggccgtccgggtcgtcttcccatgaaccgccgcgaacgatgtggggagctccggggacgatgaccagggggtctttcacagataagccgctccgtttgccgtaggcatccggaacgtaggagtccaaaacccattccgccacatttccgtgcatgtcccggaggccccacttattcggttttttggagcctgttttctggtaacggtcattggagttgttccagtaccaggcgtactggttcaggggtgcttccccgttgccgtaagagtaggcgccggaggagccggcccggcaggcgtattcccattccgcttccgtgggcagacggtagtaatgcccggtctgggcgctcagccattcgcagaatttgctggcggcgtgatgggacatggagatggcgggcaggccgtgttcatagccgtggcccatgcccaggttcatggcggcgtagggggcggtaggctgcgtgacggagtcccacagttcgtcatccggctgttcctccagaagctggccgtccttggcgcgcggacgcccgttttccatgaaggccgtataaagttcccaggggatttccgtttccgagatccagaagggagagatgctcactttatgctgcggaccttcgtccggtttccggtgcggctcttccgcgggactccccatgaggaacgttcctcccggtatggcgatcatgcgcagggaagctcccgccgcgggaaccgtttccgtgtaggattcaaaacgtgccggatttccggaagcttcaatgagctgatggatttggcgcgtcgtgccgaccagctcccgggacggcaggtcatccggaatgggaagggcaggaccggcagcgcggtccagttcccgtttttgcagcgcggatcggctttctccccactggcgtgcgctggtaatgcgcgcggcatcttccgtggccgggcggggggaattattttcttcccggcacccggccagcagggcgcttcctcccagaaagcaggaaacaaggaaaatgccgcgcatggaatggtgaaaaccggaatgccctacatcgtcatgcctccgtcgcaggcaatgacctgcccggtgatgtaacgggcatcgtcagaggcaaggaaggccgtcagggcggcgatatcttccacggaaccttgttctttcaaaggtattttcttaacgatttcttccttgagattgtcgggaatggcattggacatttccgtggagatgaagccgggagcaatggcgttgcacgtgactttgcgcggagcgaattcctgagccagtgatttggtgaaaccgatgaggcccgccttggaagcggcgtaattagcctggccgatgttgccgacgagaccgatgacggagctcatgttgatgatgcgcccggccggggatttcatgagaacacgctggagggccttgaccgtattgaacgcgcttttcaggttggtgtccagaacggcatcccagtcttcctccttcatgcggagcatcagggagtcccgcgtgatgccggcgttgttcaccaggatgtcaatctgcaggaagtctttcaaaatggcggccatggtttcctgaacggccgcgtaatccgctacgtcgcaggggtaggccttgcaggaatccggaaattccttgttgatttcttctgcggctcccccgcagctggatggactgcggctgatcaggatgaccctggctccttccgaagcgaagcggcgcacgacggcattgccgattccgcgacccgcgccggtaacgatggctgttttacctgctaacttttgcatgctgcccacagtaaacccgtttttcacggttccggcaagcttgaaatggacctggccgcgcaggaccccatatggggaaagggcgggccgggaatgaaaaaagggggagaaacggggtgagggggaggctactgtccggcctcttcattttcccggattgcattggggggcgccccgtcttcatccggttctaccaggccgctgaattcatccgaattttccaaaatgtcctttaaggcggcggaaccgtaataacgggcctcaaacgggcgtttgccttcctgcctgcagcggttgtccagcatttccattcgttttttcattttttctatcaaggcgtcttctttctccttttccgcatcgttcaatttatcctgaagctggaggaaatgccggatgtccttctgaatgtcctgcagcgttttgacggcgttgtccgcgctttccttgtcctgaacgcctgccaacgtctgctggatattgatggcaaaggaaaaggcctggttgatcagggattccgcggaaggaattttttccgccggagccgctgctgtggggaagccgttccggcggccgtttcaccaaatgcaagagaggctccggatagaagcgcagaatataagagaggaacaagaaaagccttcatcctgttcttttgaggcaggatgaaatccacggcaaggaaaaaggggaaactgaaaaaagagccttattccgccgtgatgccgcctttttcatcgtccagaatgcctgacttttccagatagtagtcatatccgcctgcgtaggcggtgatggtcccccggttcacatgcagggttttttgtgccagggaacggatgaagtgcacatcgtgggagatgaagaccagtgttccttcataatgcttcagagcctgcaccagggcttctacggacaaaaggtccaggtgggtggtcggctcgtccatcagcaggaggttgggcggatccactaggaatttgaccaagctgagccgcgatttttccccgccggaaagaacgctgacgcgtttttccacatccagcctccggaacaggaaggaacccaggatggaacgcgcttcttcctcccggatttcagcgctgcatttcatgatttcctccagcacggtattttccggattcaggttttccgttcgcgcctgggagaagtagccgatgcgcgtcgtggtaccgggagtgcgttgtccggagtcaatggggatgatgcccgccaggattttgagaagagtggatttgcccgcgccgttcggacctacaagaacagtgcgctccccgcgttccaccagcaggtccaggttttcataaaccctgcggtcgccataggattggcagactttttccagctcaatgactttctgggtgctgcgcggaggctgggggaagttgaatttaaataccttcctgcgggctaccggtttttgaatgattttcatcttttccagctgcttgatgcggctctggacttgcccggctttggaattgatggagcggaaacggtcaataaattcctgaatgtgcgctatttccttctgctggttgcggtaggccgcctgaagctgctcgaagcgcacgtccttttgttggaggaagtccgagtaattgcctcggtattccaccagttcttcgttgtcgatgtcgtacacgctttccaccagctcatccatgaaatcccggtcgtgggaaatcatcaggatggctccggggtagtttttcaggtatcgctggagccacagcagggacaggaggtccaggtggttggtaggttcgtccagcatcaggaggtccggctccaggacaaggagcttggccaggtacgcgcgcatgatccagccgccggacatttcccgggcggggcggtggaagtcgctttcccgaaaggccagccctttgagaattttcttggctttgggctccagctggtaaccgttggcggcgttgaaggtgtcaatggcttccgcgtattccggcgtatccgttttgttggcgttttccgccgtccggatagtgtggatggcctgttccatttccggcgtgatgcccagggcgatttccaggacggtttcatccttcggttcgctggcttcctggggaagatagcccacgatggcgtattcatccatgctgatggagccttcgtccggcgtgtcttctcccagaatcatgcggaacagggtggatttgcctgctccgttggggccgaccagagccacccgttccccccagttaatggtcatttccgtttccctgaacaaggtccgtccggcgtgggattttgtgagatttttgatcgtcagcatggtgaagagaggatgtattctaccgggatggaaaggggaaggcaagagccgtcagggcggaggcaggcatttttgaaagctttactggatttttacgcgtagtctgctagccttggcgcgccatgccgaccacgcagacattcaggcttttgcttgctgccgcccttttgtgcggatggagttcctgctgtactcctccggcggaggattatatacaacaaccttacgtgcagcagcaaatgtccgggctggctaatgccttcctggcgctgctgccgccggatcaggcctctcttcccgctgccggagcggaggccaggtggctggcggacacggccgtggtccagtccgcagcgattgcccgggacaacaggactgtgctgtttggctggctgaacaatattctggtcaattccaacctgcgcgacagggggctgtgctggcaggtccagcaggatttgtaccgggacctgcgccgccgccccgtgaagtatttccgcatagggctgacgattcgagaccgtggaacgggcagggagcacagttgcgtgtatgtcaatgccgcggggaagggattgcagggctccattgttctggatgcctggaagaactgcgggcatctggtgacgctgacccagaaggaccgggaaggcggcaaatgggaggaggactggcgggaaccatttgtttccaaggcctttccggagggccattcctacggcatggaacatcacctggtctggcccgggtgggccaggaaacgccccatgctggttcagcggatatttcagtccgatcagcagaatgaggcgaaggcggccgctgaataaaggggaagcctgatccggcaagaaccggcacacggtgctgcgccgcggcggtttgcggtatccgccgtttttaaggaaaatcccggcgaatcggcaaatggcggagggaatccggactcagggcaaataaaaacgcactcagtgcgtacaccgagtgcggattaattggataatttgctagtgttgcagggcaaaaccccgctgcaaacttacttgcccttggcctgcacaaccggagcgggagcaggagcggtggtttgctgttgctgctgctgctgggagcaagaagcgaccaggcaagcggcgccggcgatggcgaggatagcgatgttcttcataattcgaattaaatacagtgtttgttaactactggaacctccgcatccacggaggtttgctggcaccaatgtaaatggtggcaagtagaaatcaagagattttcttgttccatgtcacggcattacagaaaagagcaggacccccggtttctgaagtcctgctctttttgatgcgttatggaaaacggattgtttcaaaaccgttttttgcgcttacaggctgctcccaagctcaatgatggagtagtccccgtccggcctccggtacacgatctggagcacgtctcgccgcgcattcctatagagtacgaatggcttatcggaaagttccagttccatgatggcttcttccttgtaaagctttttgagattgtagctttctctgtgaatgagcaggggttccgggtcttccggggaatctcctgggtaatccagcacggaatcgtcatataccgtttcatccagcttgcggatggtttcctggtgatggggacggaaattcttcatcaggcgcgttttgtgcttgcgcatgcggcgcatgattttggtgatcgtttcatcaatgcaggcgtacatgtccgtcccttccgtggacgcgtcaatggtgatatgatccgagcagaacaggattacctgagaaatcttgcggtcgcgttgcacatcaagcagtactttaacctccataatgcgcgggaaatccaggcggatcccctcaatttttttcgttacgaattcccgaatcgcgtctgtgacttccacgtggcgccccgtgatcgtaatgggtgtgtttacgtttaccttttgcattgtcgtacctctttctagttgatgttaatgcgcggaccccgtccgcacctttcaagatatacagatttgacaatgcttgtcgaggaatcctttctttttttcgcgtgcggggaaaggcgcttttccttttccgtttccatatgccggacctgggcggctctcctacctgttgtgagccaatcaatcggggagcggccgtttccgtttatcgctttccgtcgtcttcggaatacgtttgaacgtctttgtcatacaattgcgggtataaaaaaattatttgaaagtacttgacatgctgcggaaatgccttataacagttgcgcactcctctacagatgctctctaaatcgcgggatggagcagccaggtagctcgtcaggctcataacctgaaggtcgcaggttcaaatcctgctcccgtaaccatttgaaaaccctgcaagttcattgcttgcagggttttttcgttacggatggaaaagcatccggcgagtattgggagtctgttgtttctgggagtttttgtattcggggaactggtgcccaagagggttggaatgtgtgctccggaagtaatttccaaactggcggctgtgccgatgaaagccttttcttgtgccgcagctccctttgtatgggtgctttccaaaagcacagttttcgcatgcaatttgctgggagtcaggaatacgactgacagggtgacggaagaggaaatccgcctgatgattcaggaaaatgcccgggatggggatatacaggatgtggaatgtatatttaatctcggtgaccggaatttggagtccatcataacttcgcggggggggggatattgcatggctggatgccaagatgacggaacagccgtgcggtcagggtcagaggtccgttatccgttttagaccttattataaacggataacatgagaaacgtcgccaccaatgtggctggtcgtttttttcatgttgttttgtgcttatgatctacggtgtttcccttttgatgctgcgttgatttcagtaagcttcattttgtgctttgcctgccgttttcgattgtctgagaggttttctcttttgaatcatgcggtttcaacggaccgtagaaataggaggcggtggctcccccgtcaatcaggaagtccgcgccggtgatgaaagtccccttgccgcccatcagtaattccgctacatgggctatttcatccgccgtaccgggtcttcttgcagggcacttcgcaaacatgtttctgtaaaaatcacctctgggaccgttgaattcatcgattgccagaggggtgactataatgcccggggaaatggagttgatgcgtgcgcctttggcaccccatttgacggcttccgccatgacacgcttgacgttgcagcgtttcgccatctggtaggcatgcagagtgtccttgatattcccgggttggaggagttcgaggttcagcaattcctctgttggagtcatggccagttgttcgtcctgttcggcagtcagagcgggcatgcggtgaccggattggctggagatagttactcccgagccgccggggcaaataactttccccacctcttccagcaatacggcggttccgtagagatccactttaagaatggtttcaacggatgcctggctgggggaaacccccgctgcattgacgagcatggaaatattgccgtacctctgtgcttctgcaatcaaatgcaggatggagtcccgggaagagagatccatctctaaggggatggtgtcaaatccggcctgattcatcgtccgggcaatggccatgccgatttgcccggctcccgtcaatatcatgacttttttggatagacgttgttccatgggctatgaaatcagttgaaatgaccggtttttattcctagccatatgttatgttcctctagccggacggtatggccctcccgcaaaaagggcaatgcaaaaacggccataggtgatggtattgcaaaatgggtcatatggattgaaaaactgagggggggatgaaagaacccaggcaaaagtcatggcagcatgccgattcttttcagccatgttttgacgcctgcggcattgcccggcatgtcaatcccctcatcatcggcacgtccgggagttgtaatatctcctgggtcaaggtcttctggaagagttgacggaatgtgccgggaatggggcgtaagcctgtaaatttgttgcatggattcgtttaaataagtagtcgcgtcataagtaaagaagggaatgagcgttttccctttcaggtcaaatgcctctaaaaaggtgcaaatcaccatggcaggctgatgccaccagattggagagccgacgaagatagtatcatatttccccatcagggaggcttcaggcaagttggcgacctttgggcgcaggttctcataagcttcttttttgacacggtcgctgtcgcggtaagggtcggcattgtaggcctcggcggcttcaatccggtagagatccgctccggtcagtttcgcaatttgttccgccaccgctttggtattgcccgttgcggagaaataaacaaccagcggttttcccgcatcttgtccggttctgcggacaacaggcagcccttttgcctgcaacagcgtgttcagctctttccggactgcgtctgcttccccggggccgatgttcctggacacgatatcaagcagctggtgcagctgtgcgggtgttatgcccagattcaggcagatgcccatgtgagagcgggccattggttccacaccgcctatggccgcgaggatggatacggtagccaattcgcgttcatcataggtcagaacgtcccgttcaaaaatatctgcaaaaaggtgttctttcaggaaacgttccatgaccggggcaaattcggcataggcagctttcggtgcattgacgggaatgccggagatttccgcaagaatggcgcacccgcgatcgtagcggctgcgtttgtcctttgtggggcaggcatcttgtcccggggcatcggctatgcctcgggactttcttttatccagcacggagatgaatgtctgcaatcccctcaggcttcgtggaaacccgcaataggcgtaggaatgcactaaaacttcccggatttcatttatcgtcaatccactgtccaaggcggcattcagggccggctgcagctgatgcaaatcccctctgccggtataggcggcaatcgcgatgatgtgtttctgcctggaggtcaattcctggctggaaagggcggaatttgccgccagagccagcacgcacgacatcaggcagaacaggacagacgataaaagattcatgaacctgggagagcagttttacaggtttttcccgaagaattccgccagctttccgacagcctgatccacgtattccggcacgtagtaggtcttgatatgcgtggcgcccggaatgaggaacaattccttgttgagggttcccgtggcgcggctgtagcattgttccgtcatgtagaaggtgtcggctctgctgcccgccatcatcagcaggggctggttaatcaggtgcataccttcgctcgcgtcaaaggcaaagaggtccatcaggctgcttttggtatagcggaaggtggaattggggtgggcgtggctttgcagataatagtcgtagccgtcctggtagaggtcaaagggcagttgggccgcctgttccggcgttactcctttcatgtctcccacgtattccggctgaccgccttccgcttcgcgctggcgggcggcgcaggcgtcggcaaggcgttcctgcacgctgttgatctgcgagtcgagaaacccgttgcgccggaccaggccggtgttgaacatgctgagcgtggcgactgccttgaaacgcttgtccgtctgtgcggttttcagggtgtagcctcctccgccgcaaatgcccaggatgcccagacgggaggcgtccactccgggatattgcagcaggatgtctgcggcgcggcggatgtcttccatgcggttggcgggtttgtccgtattgcggggagtccctccgctggccccctggtaggccgcgtcaaatgccaggcagatgtagccctgttccgccatgcgctggctgtaaagtccggccacctgctccttcacgccgccgttgggatgcgccacgacaagggcggggtattttttcgaggcatcatatccggcgggcgtataaacatgggcggcaatttgcagtccgttcagcgtataggtgattggatggatgttgacgcggcctcccatgttttccgtgacggctccccggtaaaccagcccccagggattggcgttgtggcttttaatgctttttgcttccgtaaattgggtttggcgggctggggctgttgaaacggccggagaatcatttgtgttcatttgctgcgcatttaactggtggttgaaggaaatcagggaaagggctattgaaataatggcgtttgttttcatggcatgtactttgcttcctcaaacagttcccattctatcatgaaaggctctcttcccgtcgatagacggattacaggttttgctaccatgattacagatggcggacgcagaaagtaaatgtgcgggggagtgtgcctgtcacctgtcaagtttgttctgccggagccaggcggccatatggtcggcaatgatgttattgtttttatcggacatcagaaaatgcgtatttccccggatgccgattttgggcagttccaccagagcagcatggccgccatgcctgttgacggcctccacaaatttgcgtcccatttgcagacgtacgcgccagttttcctctccaagcttatcggtgacgttttcaggaatataatctccgaagtagaggatgatggggatttgggtgagcttgttgaattcctccggcggaacggcgattcccttcatcgtgccggtgaggctgggcatgtcttcgggaacctccccttccgggaagacgtaggtgcccggttccagggaaatgatgccgcgcacttccgggctgcggatggccgtcagccagccggggaatccccctgcggagtgagtaaccaggatgcccttgcccacgcgcttgaagagggcgctcagggcatcgagttcttttgtcatatcgtgcgtgccgatatcgggtgtcatttgtcggaaaaactggtccagggaatccttgtccgtagggaactgtactcccgggttgaatgcgggccattcgccgatccggaagatgtcgaaccagaactgctcgtcggcaagtggcctgatggcggtttccgccgtcgttctgcccgcccgtccccgtcctgggaggtcaaccaggtaggtggcgtatcttttgcgcaggaacatgtcattaaagccctcccgtccgtccggtgttgtctgccagcaccgggcggactgtccatagccatgaatgaagattagaggaagcatgcgggcatcggccggtatctggaagtccacggcggcgtggtcggcatggtaactctggccggcttcaactgcttgcccccagccgggaaaacggctgttgtcatatgttcccgggcgttgcagaatgttcccgcccacggcaaaactgccctgccttgcaataagcaggggggcttgttccgcagctggaacaggggggatgcctcccgcctgaatcatggccggaggcgtgaatatcgataagaaaaaggcagggaggattaattggggtattttcatcatgtcatgaagggtattgagctgtcatgtttccgcaagggaagaaaagcgtgatttgctgattaacggtttgctgatttttctttgatggggcttcctccaaacacgtcggacatgttcatgaaggaaagcgcggcgtcgatctgccggacttcatccgcggacaggattacatgggctgcctctgcgttttctttcagtctggagaactttcgtgttcccggaatgggaacgatccagggctttttgcagagcatccacgccagggaaatttgtgccggagcagcctgtttttcttccgccagcctgcggagcaggaggaagagatccttgttggcggcaaagctttccggtttgaactgaggcatggagctgcggtagtccgtacccggctcaaatgtggaattctggtcgtagcggccggaaagcaggccgttggccaggggggagaacgccacaaagccgatgcccagttcttccagtacgggaaaaagggattcatgatggcgcgccatcatggaataacggttctggacggcggtgatcggacatgtcccgtgagcgcgccgtatggcttcctccgttgcttcggaaataccccaatgcgcgattttgccttcgcggatcaactcctgcatgacgcccgccacttcttccggcggcacggaatcatccatgcggtgctggtaatacaggccgatgcgttctactcccagccttttaagggaaccttccacggattggcggattgtgccggggcgggaatctgtgatcagcggggacggcccggttcctgccgtgccgctgaagcggattccgaatttggtcgcaataacgattttgtcccggtagggcgccagagctttccccagcagttcttcgttgtcgtgagggcacccgtgcgttccgtacgcttccgccgtatcaaaaaatgtatatcccatatccacggcccgggccaggagttccgtcatttcctttttatctgcgggcgctccgtaggcatggctcattcccatgcagcccaggcctatggctgaaaccttcaggccgcttttgcccagctccctgcatggcatgttttgcccgttaattgtttccatgcctgcaaaactaccataggatttctattttttccgatagacggattacaggttttcctaccatgattacagattgccggaatgaactggatagccggggccctgcctgctatgcttcggtcaaaagcaggagaaagggcatgagcattattctgaacatggattccgtaggggactataactcctttttggggcaggaaacgctgcaccccctggtcagcgtcgttgatttttccagggtcccgccgctgcggcatgtccgcaaggcttacgggttttatgccgtttttctgaaggacctgaaatgcggagacctgcggtacggaaggcattattatgattaccaggagggcactcttgtcttcgtgtctcccggccaggtgctgggcaatgatgacaacggggaatatttccggatagaagggtacgcgctcctgttccatcccgatttgctccgcggcacttccctggggcgcaagatgagggattatacctttttttcctatgacgcttccgagtccctccatatgtcggagagggaaaggcatctgttcctgaacggcctgacggaaatccgggaggaactggaacgtggcgttgaccggcacaccaagtccatcgtgacggccaatatagaagtccttctgaaccactgcatgcgtttttacgaccgccagttcatcacccgcgagcatgtgaacagggatgtgctgacggagttcgaacgcctgctggattcctacttcgaaggagacaagcctcaggaacaggggttgccctatgtgcagtatttcgcggatgaactgcatctctccgccaactatttcggggatctcgtcaagaaagagacgggaaaaacgccccaggagcatatccagctcaagctggtggacaaagccaaggagcttctctgcgccaccaataaatccgtcagtgaaatcgcctatgaactggggttcaagtatccccatcacctgagccgcatgttcaagaagaatacgggatgttccccgaatgagttcagactgtcagcgtgacgccccctgttcccggatggcctgcggcgttcttcttggaacggtccgctccggattaattgccggtccgggaatgcagaacataatcttctgttcaaaacggcaataaacaggaatcgcatattatttcctgctgttctgttgtccgcggcattccgccgcgcaggcgggcagttcccggtaccgggggaatatacgccaggggttaccgtaagggcttcagcgcgcttgattcatttgacgatgtgatgccgtggagaagaaataatgtcatcatggaaaggtaaccttttgtgggcaggtattttataaacgtgtggagcaatggcgcgccgttactgccgtctttgaccttgttacgattacggacaaagggtatggtgcggcaagataacctgcgccattagacggcacaatgaatgaaagcggtctgctgcccgtcgggaaacgactgtttgcatcctctccgcaatgccgctccgctgaataatatagaacactacaatgatgggaaactcaatagaccatggcatgttccggaattccgtcctgctggctttcggattgtccatttccttctcgggcttcgcacttgccgcattggaaaagccggttcctggacaacaggtccaggccgttgaaggcgccagaaaaatcaatcctgccgccgtggaagtgctgcttgacaacaaccgccggatgacgctggatttttacggggataacattttccgtattttcagagatgacaaaggcggtattatccgcgaccccaaggcggaaccggaagcccgcattctggcggacaatccccggaagccggtttcccggctggatgtggaccagaagggggatgcggttgtcatcactacggggaaggtcaggattgagataagtaaaaagacctctcttttcaaggtgatcaatctgaaggatcattccgtggtggcggagcaggcatcccccatcctttttgaaaagggcaaaaccagcttttccctgaaggcgaagccggacgaatatttttacggcggcggcgtgcagaacggccgtttttcccacaagggaaaggtcatttccatagaaaaccagaacagctggacggatggcggcgtggcttcccccactcccttttactggtccaccggcgggtacggcgtcatgtggcataccttcaagaaagggcagtatgatttcggttccagggaagagaatctggtgaacctctcgcatgatgaaaattatctggatgtctttttcatggtcaacgacgggccggtcagtcttttaagggatttctaccagcttaccggagctcccgttctgctgcccaagttcgccttttaccaggggcatctgaacgcctataaccgggattactggaaggaagatgaaaaaggcatcctgtttgaggacgggaaacggtacaaggaaagccagaaggataacggaggcattaaggaatccctgaacggggaattgaataattaccagttttccggccgcgccgtcgtggaccgttacaaggcccatgacatgccgctgggatggcttctgccgaacgacggctacggagccgggtacggccagacggataccctggacggcaatattgcgaatttgaagagtctggcggactacgccaggaagaacggcgtggaaatcgggttgtggacccagtccgacctgcatcccaagccggaaatcagcgctttgctccagcgggatatcgtgaaggaggtgcgggacgccggagtgcgcgtgctgaagacggacgtggcctgggtaggcgcgggctattctttcgggctgaacggcattacggacgtggcccagatcatgacctactacggggacaacagccgcccgttcatcatttccctggacggctgggcgggaacccagcggtatgccggcatctggtcgggcgaccagacgggcggcgtctgggagtacatccgtttccatattcccacctacatcggctccggactttccgggcagcccaacatctgttcggacatggacggcattttcggcggcaagaacccgctggtgaatgtccgtgatttccagtggaaaacgttcacccccatggagctgaatatggacggctggggagccaatgaaaagtatccccacgccttcggggaaccctatacttccattaaccggtggtatctcaagctcaagtcggaactgctcccgtacgcctacagcatcgcggaggagtccgtttccggcctgcccatgatccgggccatgttcctggaatatcccaatccctacacgctggggaaggcgacgcagtaccagttcctgtacggcccctattttctggtggctcccatttaccaggaaaccagggcggacgaggaggggaatgacgtccgccacggcatttacctgccggaaggacagtggattgattatttcaccggggatttgtatgagggaggcaagatttataatgatgttgacgcgcctctgtggaaactgcccgtgttcgtcaaaaacggcgcgattattcccatggcgaatccgagcaacaatgtctcggaaattaatccgaacctgcgcatttacgagctttatccgcacggcagcacttccttcaccgtgtatgacgacgacggcgtgacggaggaatacagggccggcaaaggcgtccgcactctggttgaatcccgggtggacgacaagaacaacgtgaccgtcaccgttcatccggcgatgggggatttcaacggcttccagaagaagaaggctacggagttcctcatcaacgtgacgcagaagccgtccggggtttccgccaaaatcggggaaaacagcgttaatttggcggaagcgaattccatggaggatttcaagtccagggagaatgtttatttttatgaccgggctcccaacctgaacaggttcgcgacgaaggggagcgattttgagaaaaaggtgatttccgggaaccctcaattgctggtgaaactgggcgcggcggatattacggcggcccccacggtgctttccgtggaagggttccggtttgaacccgctgaaaagcatcgcctttcttccggcgcgctgaccgctcccgccaatgctgcggtgacggaggaaaacgcggcggcctataccctgaagcccacgtgggacgctgttccgaatgccgatttctatgaaatcgaattcggcggaatgctgtacaccaccatcaaagggacggaattcctgtttgaggatttggaggctgagacgccttattccttcaaggtgcgggccgtcaacaaggacggccattccgcgtggacggctgtcagcgcgaagacgaaagccaacccgcttgagttcgccattcccggaattgagggcgagacgagtgtcgaaaaccagggcagttccctggcgaagctgtttgacttcaaggaaaaggatgcctggcacacgaagcatggagagaaagctgtgccgtttgacctggtcatggatttgaagaccatcaacaagcttgagaagttccattacgttccccgcgaggacggcggcaacggcacattgctgaaaggctccgtttattacagcatggaccgggagaactgggcgaaggcaggaacgttccagtgggataaaaatggagacgtgaagatattcggcttcaaggatgctcccacggcgcgctatatcaagcttcatgtcacggaaagcgcgggtgattacggctccggcagggaaatctacgttttcaaggttccgggtacggaaagctatttgccgggcgatatcaacaacgacggcaagattgaccggaatgacctgacttcctacatcaactatacgggcctgcggaaaggcgattccgactttgaaggctacatcagtaacggggacatcaacaagaatggccttattgacgcttacgatatttccgtggtagccacccagctggaagacgaagccgaccagccgcaggaagaagccgacaagaaagatgaggaagaggataaggcgggaggggacgacgagaagaaaaaatccgccgaggaggcaaagaagaaagtccgcgtggacggaacgcttttgcttagtgcggataagaaaaggtattccaggggagatgccgtcaaggtgtccgtgaagggccggaacctccggctggtgaatgccctgagcttcgctcttccgtatgaccccaaggatttggaattcgtgggcgtggaggtgaagaacatgaagaacatggagaacctgacgaacgacaggcttcatacgaacgggaccaaggccctgtaccccaccttcgtcaacatcggagacaaagagcctgtggaaggaacctccgaactgtttgtgctgaaattcaaggctcgtcgcgatatgaagttccagccgaagctcacggacggcatggtggtggataaaaagctgaacaccaaaaaattgtaatttaacatcctgatacggctccatgcccggccaaatggcggccgcgcatggagcctgccgttccggcggagtatttccgcagtattcatcgctgtggagcggtgttcttccgcgtgttttggagaatccggacggagcggcgacacggaaatattttcctgcctcgcgtttccggcggagcgtgacgcaatggggctctcttaacaggcggatgaaccgtttttttctggcgcgaccggtcttttcccttatgttgggggcgccagacaggccccacgatgctatgaccggccccggactcatctccttgttctgctttttaatgacggccgcctattttttgcgcggcgggatgtgtgcgggcgccgttttgtgcatgggcctggcgtttttttcattttcccgtcgcggctggcttcgcaggagcgtcacgtttctgctgcaggcttccctgcttttctggggggcggaagcctggcgtctggccaggctgtggatgatggaaggggggcctttcctgctctggacttccattccggctgctgcgctgttgcttcatgcggcggccattctatggcggaggcgcggagaaaagaatttgcccgttccggagctggcccgcagccgcgtattttccgtttccgtattgcttctgtttttgctggatgcgctggttcctttccgtttgctgatgggggagcgcatcttgccgtggcagggggtcaatgggctggcgattcttctcctggcctggtggggcggctattgcgcggaaggtttgttgaatccgcagacgtctccacgcaggcggcaggtgatgtggaccgtgtttgcctccgctttttttctccagtttctgctgggagtgacggtggcttcctccctgctgatgacggggaagctccatattcccgtgccgtttatgatgatttccggcccggtttaccgggaagaagggtttttcatgctggcattgttcagcgtatccgtccttatggccgggagttcctggtgcagccatttgtgctacttcggggtgtgggactgcctggccgccgcttcttcccgcaggaaggggcatccggtgccgggtgggaaaaaagcctgtgactggaggtggttttcccttgccgcggcggtggggattcccctccttttgtccgtgtggggcgttccgctggggtatgccctggcggcggcgttcgccgtagctttcacggctccatttgcctggaagaaaagttccgaaaacggtgtgcgggaatattgcagcaggttctgccccatggggctgaccgccagtttgctgggcaggctgtccccgtggcgcatgcgcgtcagggagacatgcaccgggtgcatgcggtgcgcctccgcctgccgtgatctcgccatctcgcgcgggggcgaggcctgccgcatttcccggcgctgcaccttgtgccgcgactgtatttcccggtgtccgcatggcgctttgagcctcggcatggccggccccttttcctctgtaccgtccgtgcgggcggatatgtattttgtaacgctggtttccgtcatgcatgtggtcttcctggccacggctcgaatctgattttatgttgccatgaaagatttctgctccctggagtatccgttttgcggaggatggatggcatctgtccattaggaggctttttcagggctgccgtcagagggattcaggcagcggtgcaggagggggacggccctgaattcatggaacggcatggttccctcttcccatccgaaagagtggattttggtttcagaaggtcatttttgttattcattgagagatttattgatgatttaaagtttttgttatgatttttgaatgaccgttcaatttattaaagtcactaaaaaagatagggtctgctatgctccggtgccggagccgttggaagagggggataagctggaaatcatggaaatgaaggatgaagcccttttcccgccggcagggaaaaacgcaaggatttccctatccaggaatcccatggtattcgtgaaaatgaatgacggattccagcgcatcctgatgaagaatatcctgtatgtggaggcgggcggaagttattgcacgctgcacgtgcacggcatgccggctatcctggtatccgctccgctggcgcgggtatccgagcatctggatggggaatattttatccgcgtgcaccgttcctacctggttaacaagctgcatatagaatccattgcgggcaacttcctccaggtgggcgtcgttgccattcccatcagcaaattcatgaagaaaaaagtgctgggcagtttgaacatgctgtcgttttccaaataagttccggcctgccgcacgggctcctgcggcgttccgggaaagcgaaatggaacggccggaaaggcgggatggaagcagaaacggaatggccgcatcattcacgacgtcgccggaaggcggcatatcaatgaatctaaaccagaaatagaaattaaatatatggcaattgacagatcagcagcagaagcggcgacttcctccctgcagtcgctgcctttcggcaacatcatcggcggtcccctggtcgcctgtgtggaagcacaggcccaggcggcccggacttcctgggaattcatccagaacgtgggcctgtacgcggatggggaagagaagaagacggtgaacgtttccttccagttcatcaaggacggccgcatggctcagattacggttccccttctgaccatcgtccccattccctatatcgctattaactccatcgacattaatttcaaggcgaatatcagcgcgtccgccgccagtacggagacggaaaattcctccagttccgtagataccagcgtttccgcctctgcaaggtgcttttgggcgcgcggcagcatgaatgccagctattccagcaaaaaggactcctctgcgaccagggattccaaatacagcgtggaatacaccatggacgtagccgtccatgccggacaggacagtatgcctgccgggatggccaaggtgctggagatgctgaacaatagcatttccgtcgtttctccggaagggttcctggacgtgcagcatgccatccaggacgacggaaccgtgaaattgataacctcctacaaaaacagggaggggctgtttgacccggaagccatcaccctgcggataggcgaagcgacggaaatatttgaaaacggtgcggggaatgaagccaggattgtgaaaacggattccggcaaggaatacacactttccagggaagacgccagaaactgcacggtgagcgctggagaactcaagaggaaggtggctgtaggcgcctgataaccgaaccatagcgatttctcctccattccagagccatgtcccgtcttaatctcatcgtggaatccctgctgaaggacattattgaagcgcagcatgcggcaaactgccacgcggcatcactggcgcgccagtatgggaagagaggccgtgcgtgcggtttcccgctgcccagcgcccagataggctccctggaattcgatttgaaatatgcggtgacgggaacttccggggtggaggagaaacaggttgcggacacagagcagtggagcctgttccggcaggaattggaagagcgcgtgccgtcgtttgccatccgttccattgtgatggccgtggtgcattccagccttccggacgacgaagcgagaagcgacttctcaagcctgctggccagggaggaacagtggaaaaagaatttctgctcctacctggggaagaaaatttccgcagccgtttccgctcatgagggcgcgctcctgaaggcggaacccgggctggacaggggattgctgctggagcttctggcaggcgtcgcggaaagggaattcatggataatccggagctggaggacctgttccagggaacccggggagaccccctcaggcaggaatgccgcgccaatctccgggaaggcctttcctctttcttggccgctctggcggaaaagtacgtcctcaccaggcaggaaagcagtgtggtggtggatgtggaagtagaggcggacaagctgaaaaagatgccggaggaagccgtgcagaccctgcgcctgaatatatcccctgtttccattccctccgttctggcggagcagaatgatgtttccgggttgtccgcgcaatagtgatagatgatgagtgattctacaaataataacaaggtgaacgggcacattatgagcctgcagcagctgatttcagcgccgctggtcgcaacgattgacgcggatgcgatgtccacggaacgctacatgaagcatttcatgtccctggcctttgagtcctacaatcctgtggacggttccaccggggcgttgaggttgatcagcttcaattttacggacagcgacgcttccggcggcgcggaaaagaaggtcagcgtgccgctcgtcagcctggtgacgctgccgctgctgcaaatcaaacaggcggattttgattttgacatcaatatcattgacgccgtagccgccgcgccgaatgaacatttttccctgaacaggggagaggtggagtcccccggcggaaaagagcgggatgaagggctgaattttcgggcttccctggctccgcagtccgggagaggggcttcttcctccctgcaggcgaacatgaaaatccatgtctccatgcagcaggctgacatgccttccggcctgtcccaatttctccagctggcttccaggccgcattatgaggatgtcccttcccgggaaaagaatgattaattgaaaaaaacgatatggaccagaaaacaacttattcctaccagcgcactccgggccttgactgccccaaatgcggggtgtatttccccacgaccattccggacttgctgtccggctccatcaggtgcccttattgcggcctgacgctttacattgaccggaaagaatcaggccatgccatgcaggccctggaaaatttccagaacgcattagacaagcagcttccctccgtctccctgtcatgaagaaaccgttgattatcctgtccgccgtgctgtgcatggttctgccgtccttgtctccggcggagatgcggcagcgggaaccccgccagcttgccgccgcctggcaggaagtaaagaagcagatagcagacgacgggaaaaccatccgtgtgagggacggcattcaagcgcttgaactcctggcggaactggggatctcttccgttccggcggacggcgtcaggctgtcccgcggcagtctgaccattgtggtcacgcgtgggaagaaagaggacgggattttttacgtgctggctgttaaggaagaagggggcgcaagcctggaagtgaagatggttcctccttcctgatttgccggagaggaaggtcattcattttcaaaatcccacacgcggcggcgggcgtttttcttcgtccgcccgccgttggctttccggaaggggtcaaaaagagagtccagcccgttccctttcagcagcaggcactgttccatcagacggcccagtttccctttcgggaaccctttggcctggaaccaggccagatattcctgggggacgtccatcagcggacatcccttgggcgggtatttggcaggaccgtacatgccgaaagggatatgggtctgcgcgatttcctccaccagttttctcaaatcttccgcatctggtatttcaggatcgttcataggttttgcagaataaatggttgcaggcattccgccagcctttccggcgtttccaggggaagccggtggccggcatgagggatgatgacggcttgccctcctgccatgcgccgcgccagggcgctgaatctggcatcgcgctgtccggcaatccacagctggggaacaggggattgcttcaaaagcggggccaggttttcctgtgcgcccacggaccagtcaataaaggcgcgggagatggatttgcgccacggtttcagggaagaacggtccggaggcggcggactgccttcaaatactccctgggcatcccattccttcaaaaatttttcccaggatgcggaaaggcattggacggcccattccgcatccttcgcccgccgcgccgcccgttcctcttcatgttccaggccgggattggcgctgacgaatatggctcctttccagagagggggatgggccaaaacggcctgcatggccaacctgccccccagggaatagccgcagatgaggggatgacgatcctgggaggctatttcggaacaaagcacgcgccccatatccttcaggcttttggggcagcattccagatacctccagaggttcagggcgcgagcctccactcctccggcacgaagaaaatccatgacgggtttccaatccgccggagaacccagattgccgtgcagaagccaaagcatggtcggaaccgtctttctatttgacgccgtagccggcgaggccgttcataaacatctggacggaaatcatgatgagcaccatgcccatcatccgttccaaggcgattgtccctttttctcccagcagacgcaggaacttctgggcgatgaaaagcaccattccggagaggaaccaggcggtcacgatggccccggcataggtcatctgggaaatgctgtccggagtctgggaggcgtgcagcataatgatggacagggaagaggggccggccatcaggggcatggcgatgggaacaatgaagggttcgtcttttccgtccgctcgtccggaagaagaaagcatatccttggcggggaagaccatgcccagcgctacgagaaacagcaggatgcctccggaaatgctcagggtggaaggttccagccccagcaggttcagcaggaattttccggaaaagaagaaaaggagcagcaggctcaacgcaaatacaagctcccgtgtcagaatagccttctgctgggcgggcgagtattttttcagcattccctggatcatgggcgccagacccaccgggtcgatgacgatgaacagaagaataacagtggaaaggaagtcctgcatgggatatgccccgttgtaaacgatacgggcgtgtacgtcaaagggaaccgccagaagtggaaattttctctgcccggattgctattttcttcaccagcgcaggagccgggcctttatgcctggaaagcgatttgagaaattctggggaaactttgcgtaggagaccatagctttttaataaaacagaaaagctattaaggcaaggctccttcgggagaccggctcgatgtttcaaaatctgctttccctacatactcccttcgaacaccggggttcgcaaatccatccttgaatctgacttcaagctcgtacctcttgttattgcgaaggtgctctaaatacgtcagcaacaaataagcttcctggatgggaacttcatgcttttctcccggctgcaacgtaatgaaacgtatggaaaacggtagacgttcaactgtatacaggggactataccaagctaaaggcttctttccatcgcttattacgctccctatacacccaattcttttctcgccttcctttcgccatatttcgatgtggatattagggctatgatccttcaggggataaaagtcgtcgaacaggcgcacggtcttttcgcccttgttcgtgaacaccagcttgaagtcagggaacgtctctcttgtgtcaaaccgggtcttttccatcaccacggaacattccactccgttgtcggccatgtccccccatgccgcagcatggagggacaggtttgccagaagtattaaataccggaagatttttttcattgcagcgcgagtttggccgtcgcccggagcatccccaggaaacaatccttaccctgctgattatagtagcgcgtttcgagttcacaagaacattgtttccagccttccagatcgacttcatccaggcataccggaatcgtgacgctgtattcccggccgggggccagttcccggtagttcaagggtcgctggaaggtcatggtgccaatttccctgttcaggatgcggacatctccccgttccgtcctcaatacagtcacgaaaaagtaatcggctgtttcgtcgttgatttcgtccggaatccggacaggctcgtttccttcgttgcggaaggagactgtaatttcgcccttcatgaaattggcagtgtccacaatggagagctgaagaggtgtcgatacctctgcaattgccatactgcgggttttaccttcgttaaccggaggcaagaaacagggcggctcaataataccgggttctgttacatttgtgggtactttgctccatcccttgatttcggctaccctgataagcttgcgggtagtgttattcaggaccttttgtccggcacagtaaggtctgtcacctgggttatccggcaatttttttatgtaagcgataacctctgtcataaagttaatgctagcatttacggctgtcagatccatcgcagctatggcggtttccatatccttaactttatcgcaggaaagagttttctcttccaatttttcctgcaatttcaaatgtttccagtagaatttgtaggcatcttcccattgacggcggtggtgttcttcgtgggcgagagaagcttccgccgtgtgccatatcccaagaccttcaccgctctggtatccgttcaaatcgttaaccgccataatgcagtcctcttcattggtgggaggtgtaagaagggcatcaatgaacgacccggtacgaacaactaccgtagcgccaccagaagcagaaacaacgcgacacctccatatattctcagtttcatccttacaaaccgttacaacgatgttaacaggcgtgttttttgtctgactattaccttcttcttccgtggtaacaggttccggtttctcaaattcaaattccacgtttttggacggttcgcaggtaatggtggattccttttcaatcgtccacaatttgattttgggggacggcgagaattcgcgtttcatcgtcgagttgccttcgtacttcccttcctgaatgggttccctgtccatcgtcacattgaacgcggcagcattgttgctgacgggggtgtaggcattattcgtgtaagacaaggccaccttgtaatagccagctttcaggaacctggcacccgttgccagattcagcttgccgttgggcttcgttccatccttctcacaaagctcgttgcccgcaatggagatgctgcctgtgtcgtcggcttccacgccgaaataatacaggccgtcttcctcgaccttgatgaacatttgcggcgctcccgcgcaagtggcgtgctcgcacgccgaaccgtcaaagttgaacgtcatcgcgtcaactccgagtttctgagggatgagagcctgctccccgtcgcagataagcttcgggccgaccgccttgttcagtggtatataattattcatgttcctgaattgtttcttgttcacagaactaaccatttagttctgtgaacaccttgcaggaattccaaaaaaacaacaacacgccccggacgtgatgaggaaaaatcctcgattatctccaataaaaatggcggatgccatccagcgcccgccatatatatgttaatagtttggaacgtatcgctacgcttgtgtatgaattaagctagaccctacaggggctggtagccccgttcctcctgccggatgagttgcccctccgggatacagactctttacatttccgttttcggaaaaagcggggtttctgaaatacggattcaaggcagtcgggaaaaataatacggaaacgcccggcacggaggcttgtgacgccggacgggcattgaatggtatttccgttcccggagttacagaagaaggtcctggatgttgtccgaggagatgacacccgtttccgtggaggacagtacgcagagggcgtctaccaggttttcctgccccagagccagcccggcttcttccaccagcacatcgtcaatattcagggtagcgatggaaaggggagccgtttccggggcagaaggttccatcagggctgcaatgccgatgacggcagccaccagggccgccgccgcagctccccaaatgcggaaggaatgccgcttgaagtgatgaatggattccaccggaacggcgggagcgcattcttccctttcaatacgcatcatgaccttgcgggcaaaatcgtcccccggcgcaggttgggaggcatggcccagaatctgccagagttttgtatcgtcctgttcgttcatggttgtggttccgctgagggttctatgaagaaaaacaccggaagatgggtccggtttcttgccggtgtcatttttcccgttctgccgcctgtctgatgacgggggccagtacggcggcgatgcgtgcgtaaccggccgcagaagggtgcagtccgtcgctggaaagctcttccgggacgtatccgtcgctattagccatgacgcgtcccggttccgtataaatgaaattttcttccgtggccaggcggttcaggaggagattgatgccgacaatgcgttccgccgtaccttcccgggcgctgttgcgcgggtaaaatccctggaggatgatgacggcttttgccagtttgccggtgatttcccggcagacggcacgaatgccttccaggatttccccgtccgtgttttccgcaaggttgttcgtgcccaggagcaccacgcaaacggcattgtcttccgcaccgtccagttctccgtggcggagccgccacagggcgttttccacccggtcgtagccgaaccccagattgaccgcccgcattcccgccgtgcacaggttccatgtttccggggatttttgcaaaatgtcccggtgcggttcatccacgggcgcacctccccagaaatgcgtgatggagtctccgatgaagaggaggtccgggtgtgtttcgcgcacgatgcggcatgcggcttcatgccgggacgcccagtcgtaaatcatgaagtcccggtcctgggtgcagggaatcagcgtggagggtacggcccgggcgggaggaggtccgggcatgatgaaggtttccggggctgtaatgccgcgctttccccggaacaggcggaagcggatgcgtgcgccgggcggggcctgcaccggagccagatagcggccctgcgtgcagagcatgcggggagagcccgcattcacgtccattcggatgacggcttccggcggagcgttcaccgcggtaagtaccagttctcccgcctcattcagggaggcgcggattccggggggtggggatgattctatcatgagacgtcgcgcatgtgctggcgcatttgcctgcgtccgatagagttcggcccgcggctgtcctgcatgcagtagttcacggggcggctctgggaggcgccgtggggagcgcccaggcgcttgtccggctctgacggcagcagatgcaccactctcttgtttttccagaccagccagagcaccactatggccgccagtgcggagatgtgcaggatgatgccggctacattggccagggcgaaagtcatccaggctttcatcatggcatggagggaggattcttgcgtttcctccggttcctggatggtgatgttggcttccgggatgctggcagggttgtcaggctccagtgcgggaagggtgggcctgggggcggatgccatgtccgcctccgttcttcttgccagggaaatcatggcctcaatgagctcgtcctgcggattggtgaatcgggaggcgtcctgcttcacctggtacaggagatccctccgtcccgcatccctaagctgggagctcagctccggatccagtgcgatctgggcgcttttaatatcccccatgtggaaatggagcagcaggttgcgctccttgttcctgaatatctggcgggcgatggtgggagcattgacggaaggggggactttctgtccggccgcgaagatgctgacgaacaggttgacattgtagcgggatttgatgagcttgataagttcgatgacgtcattgctttccacttccgcgagaagcttctgggggtcaatcaggccggtggaggtacggatgtagtccggcaggaaatattcattgacgtccgtaaagtcctccggaatgggatccacggcgggggagtctgcattggcggcgggttccggcatggggtcggagggagccgctgccgcatccacagggggcagcaagggagggttggcattccaccacgcgcctctcatcagggattgctggtcgtggttggtccatttcagggcgggtaattcctgggcgggtaattcctgggcgggagccggaaagatggccgccgccagcaggcatgggaacaaaagggggttcatgcgcctcctcctttccggtcctcgggggtgggaggcgttaatccgtagcgcatgggatgcctgactttggagcgcgctttcctggctacgagctggacggcgtttttcatgatggcccccgcagcctggagcagcatgctttcccgcaggggaatgcgggctttcatgatggatttgttgatcaggtccggctctacataagggtccagttcatagccccacatgaagcaggccgtgtccgtgcgcacgtccagcaccagaaccaggagccactggggatccagcggtccctgatggttagggaagccggcctcatccaccgtcaggtggttcatcgtccagaaactgtgcggaataagggaaaagggctccaggatgttggggaaatagacggacaggagaacgggggggatgcggcgttccagtttctccagcagggcattcagcctcatgcggtcctgctgccggagagcgccggcgttgtcgcatacgcggcggtagggtatggcgtctttgccgtattttttgtccaggttttccagggaaaaaccgcagtgagggcacaatgattccgccccgcggtggaaattatgtaaacacttcggacaagtcggcacaaggaaagtttaagcacgaagttcgttgccgaaaagactaattgtcagaaagaaatcatgtatgtctcaatcttccagattttctttcgtgacacggtaaatggcggcgcatctggggcacgtgacttccagctcctcttctccctggaacaggtcttccttgttgtcctgaagggtcttgagcgtgggcaggatgcggtccagcgtgcagccgcagtaaaagcggaaccggcgcgtttccagcactcgggtattttcatcttcttccagatgggccattttctcccgggtgagggaagcaagccattcttcatccgcgtcaggctgggccgtcaccatggtgtagcattcatccgggagctcaatgcagcgggcgtttctctgttcgctttgcctgtagaattcctccacccaccgggccggagacgttcccggaatgggtacgacggagtattgcggttcaaaccccttgcggagcagggtggaatacagcgtgttttcttcaggttccttaatgtcctgtgtgaagacgcgccccactacggattccgtcagggaagaaccggtgacaaacagattggcgacggcaggcgtccggagattgactgtccaggcatgctgctccgcccagggccgtgcgaccatatagagggtgaaataggccatgagttctttcagcaggctgtcgcagagttcttcgttgcgcaggccgtactgcatgaggtgaaggtagtagtccgtaaacaggggagaaaattttgacctgagcgccagacaattgcgtccgcggacaaagatggattcaaccgtaatgaattcttctaccagttcttcgctcatgtcattcaagttcggtcttcctttgtggaaaatcaaccgttcctcctgtcattagagtctatcatgacaggcaggtgcggcagtattctttttcccggcagggaaaggtgcggcggagaaacgggcgggaaataacggaggggcccggggactgcacgcaataagcctttaccatgcctttccgcgcgtttaacatatacccatggcaactgacaaaaatatcaccatccatacttccaagggcgacatcaagctgacggtgtttgcttccaagacgcccgtgacggcggcttcctttctgaatctggcttccaaggggttttatgacgggctcaaatttcaccgtgtgatcccggatttcatgattcagggcggcgatcccaccggcacgggcatgggggggcccggctacaggtttgaagacgagtgccgcccggacctcaagcatgacggccccggcgtgctttccatggcgaacgcgggccccggcaccaacggttcccaattcttcatcacccatgtgcccaccgactggctgaatggcaagcacaccgtcttcggcaaggtgacggaaggtcagagcgtggtggattccattaagcagggagataccatctccggcattacgattgaagataatgcggatgatctgtttgcggaacaggccgaccgcattgccgcgtggaacaaggcgcttggtaagtaacctcattccggcattcactcggcggagcgcggcgcgggggcgcccgttccgctgttttcctctctctgctttttcagtacatggttctgtctgttcaaaacctgcgtgtgcagtatggcgcgcgcgtcctgttcaatgacctttcctttacagtggaggatggggaaagaattgccctcgcgggccataacggcgcggggaaatccacgctgatgaagtgcatcgccggtttgaatgaaccggattccggctccattatcaaatccaggcattcccaggtgggttatctgccccaggaaggaattcatatccgagggcgcaggctgattgatgaagccatgtccgcctttgcggacctgatggatcttcaggagcgcattgatgtcctgacgcgggaaatggcggggctggatccccgttccgccgcctactctgaagttctcaatgaaatcggggaactggaactggtgctgcatgcccataattccgcccggctgcgtccccggacggaatccatcctgcgcggcctgggattcaaagacagggattttgaccgggattgcggagaattttccggcggctggcaaatgcgcatcgcattagccaaactgctgctccgggagcctgaagtgctgcttctggacgaacctaccaaccatttggacatccagtcccaacggtggatggaacaatatctgcgctcctaccggggcgctatcatccttatttcccatgatgtggcgcttctggatgctctggtttcccgtacgattgctttttaccacggccgggcggaggagtacgcgggcaatttttcctattttctgaaagaaagcgtgctgcggaaggaaattctgctgcgccagaaaaaggctcaggaccgggagattgccaaaacgaaggaatttatcgaccgtttccgttataaagccaccaaggcttctctggttcagtcccgcatcaagcagttggaaaaagtggaactgattgaggtggaagaggatgatgccgtcatgaactttcactttcctgctcctcccgctggcgcccattctgtggtcaggctggaaaaggtttccaaacattatggttccgtttccgtttttgagaatgtggattttgaaatcgtcaagggggaccgcattgccgttgtaggagtaaacggggcggggaaatccacattttcccgccttatttccggcggagaggcccccagttccggcagcgtgaccatgggacgccatacgcaggtagcttttttctcccagacgcatgctgatgatctggatccggataaaacgattctggaatgcgtggaagctgccgccacgcgggaatctgcgcccatggtccggaatctgcttggctgtttcctgttccggggggatgacgtacacaagcgcgttggcgtgctttccggaggcgagcgctcccgcgtggcgctggtgtgcatgcttttgcatccggccaatttcctgattctggatgaaccgaccaatcatctggacatccagtcccagcaggtgcttcaaaaggctctgtccgaatatccgggttcctactgcatcgtttcccacaaccgcagttttttggatcccatcgtgacgaaagtgctggaatttgtaccgggagagaaaccgcgcgtttacctgggcaatgtttctgattatttggaaaaggtggagagggagcaggccctggctgccgtagccgcctcacccccctccggagcggcggaaccgggcgccggattggatcgcaaggcacgcaggcgcatggaggcggaaatccgtcagaagaagacgcgcctgctacgtccgcttcaggagaaactggagctgctggaagaagaaatagcgcggctggaaacggaaaagacggaaattacttctcaattggagcgtccggaagtggcggctgatacggaagccgtcatggagcttacctcccgttttcagcagacggaccggcagctggaaacctgttttacgcaatgggcagatctttcggaaaagattgaagagacggaagcgcgcattcaagaagaggcggaaagaagcgtttccgggagctgaggggattttctttaggaaactttgttgttgccggatatctaatccggagacaagcttttccgcaacgtgataaatgaatgtttgtccgttgcgggaaatcataagcctggcatgtcctgaaagcggcttccgtccatttccctgcaaggggggaagatattgagaaccggaacgggaaaaatcagatttctttcaggatggccttttcttcccgcttttccgtgtttttttcctgtactctgaaatcgtgacgccgaacagggtaagcaggatccccgccagggatatccaggtcaggcgttcccccagaatgatggctgaggccaccacggctacgaccggtaccatgtaaatgtaaacgctggacttgacggctcccagaatttccaccacgcggttccaggtcaggaagcacagtgcggaagcgaacaggcccagatacagcaggttaacggcattgacgggttttgccatcagacgccagtccatatttgccggaaggacccacagggcggggatcatcagcgcgatgccatagaaaaaaatgcggcgcgtgcagatgatcatgttggacgtgttgacgccgatttttttcatcagaatggaatacgccgcccagacaaaggccgctcccagagccaggatgtctcccgccggattcagttccagcacgaaggctccgtttgccatgatgaggaagatacccgtaaaggcggcggcaaaacccaggaagaaacggcgggaaaagccttcccccttcagcaggaaatgagccagaagggctgtgaagaaaggaaccactgccacgataatccccacattggaggcaaaggtataggtcagggcgatgttttccagcaggaagtacagggtaaccccggtcaatcccgctccggcgaacaggaattcctttttccaaccggagaatggaagaaaccgcggtttcaggcaccagagaaaagcatatcctattacaaagcgggtgaagagtaccgtgacgggtgtgaaatcccgcaaaagcaccttggtggagacgaaagtcgttccccagatgagaatggtcatgagggcggctgcatggcccagggtacgctggcgggaactcattgcatcatggtgcgggtgaagggggcgtttccagcgtcaggcccagaatttccgccggttcctgatttttgttccagacggcgtgcagaacgccgccgggaacgagctgggattcgtactcgtgaaccgttctttcttttccgtcaagcatgacagagaccgttccacgggtgacaatgaataaatgagcgtgggcatggcggtgcggggaaagggggccgccgccgccgggggctattttggcgaaagctccgcctttcaggatttgctgcccgtccgcaaacaggttcctggccttgaagcccgtatgatcgggaatgggagaaaaggcgtccattcgtttatttgcgtgccaggtcgtatccgtctttgcggtctttgatgacccagcccagcgctaccacttccgccctcagacggtcggcttccgtccagtcccggttctgtttggcctgccagcgctgatccgccaggatgcgaactttttccggggcttcctcccgttcctcctctggaagaataatgccgaaggcggccaggataaaatggaaggcattccgcaggcggagcgcctcctccggtgaaagggaggggatatccgcctttttgatggcgctgaaaacatggcccagggcttccggagtgttcaggtcatcgttcaggctgtcccatgccggctggaaaattcccaatttcgggaatgccgcgcagaattcctcataggagggaacggaatccgttccggaggcgttcctgagctgcgtgtcgaatttggccaggcggttcagcgcggctttagcgtcttccagcgaggaaagggtaaagttcaacggacggcggtaatagccccccgccagtacgtaccggaccgcggacggcctgtggcccagtttgtccaaatccgccagcgtgtacatgttgcccagggatttggacatcttgcctccgtccaccagcaggtgcgtgatgtggaaccacaggcgcgcgaagccgccgccgcaggcgcagcgggactgggccacttcgttttcatggtgggggaataccagatccacgccgccggagtggagatcaaagtcattgccgaagtatttatggatcatggcggagcattccaggtgccagccggggcggccttctccccagggagagggccagaagttgtttccgtcttccggcctgcggctcttccacagcacgaagtctgccacggagtctttttcatattcgtctgcgttggaccgggtattggcggtttttcctaaatccagttcacgttcgtccaggtgggaaagccttccgtattccgggaaggaagaaattctgaaatacacggaaccgtcttccgatacataggcatggcccttttccaccagtgtttgaaccatccgtatttgttcgggaatatggcccacggcggagggttccgcatggggaggcaggcaattaagggcggcacagtcccggtggaacagatccgcccagcctgcggtgaattccgccagagaaacgccagccttttgagaatcccggatagttttgtcatccacatccgtcagattgcggatatgcgtggtgggcaccccccccagttccaggacgcggcggaagacgtcctgcatcacgaaagtgcggaaattgccgatgtgggccgggccgtacaccgtgggtccgcaacagtaaaagcgcagtgtttttccatccatgggagaaatgtcctgggccgttctggtgcgggtatcgtaaaggtgtaacatggcggaacgattagaagggaagagggcttcccggtcaagcgggaaaagaaagccggggatccgcggttgtccgcgtccccggctttgaagaaatcagaggatggcgagagaaagggaaacgctatttgtccgcgttttgctggccctttttataattctcgttaatacgttcgatttcctcctgggtgatgaatttttcccggtagggtttgttttccacagtgcgttccagagtatagccgaaacgcttctggaaatgtttcttgtgggtttccattttcttttcaaactcttccaggcttggacggttcttgtggctgccccacgcggtttcggaaacagccatggcgcgggggtaggtcatgtacatcagcaattcgccggagggaatccattccgcccacatgcagaggttgattcccttgatgtgcttgacgtcattcttgtcccgtccgttgcggggatcgaagttgtagcagtctttcagcaggatgggagctccgccgggccgggcgcgcacgtcgtccgccgggaatttcatctgggtacgcgccagataatacttgaactggggggtgacgatgaggtcgatgccctgttccttcgtcttatcaatgcaacgcgggaattctcccggcagccaggacatgacggtttcccccttgtggtaatagctcttgttgatgtcataccacaggatgggctttttccggtgcttggcgagcatggccgtcaggcttttcgtgaaatcgctcatctgggcttccacattatccccctggccctttttggctcgggcggcctggcagtccgggcactttttccagtcccccatggggcattcgtcaccgccgatgtggatgtacgggaaagggaatatctgctggacggtattgaaggtatccttaagaaactttttagtggccggtttctgcgggcaaatcagcttggaggaaacaccgccgtgcgtccatacctgggcccgtttggtgttgcagcagaattcgggataggacgcggccagggccatgttatgacccggcatttccacttccggcagtacctggataccgcgcgctttgcagtaggctaccaggtcctggagctccttcttggtatacatgccttcattggccagcagggagttgttctggctttccggagcggaggggcggacggcgccgatggtgcggagcttgtcgtagcccggcacggggagacgccagccctggtcttccgtcagatggagatgcaggacgttgtatttgtaataatgcatggcgtccacaaaattgtatatctccttcatgggatagtggtagcggcctacgtcaaccatcatgccgcgccagccgaagtcgggggaatcctggatgctgccacagggaagtccctcaggagtatccgaaagctggtcctggagctggaacagggtcgccatggccatggccttcccgttgggcgtggtataacggagttccacgccgccgggcgtcagtttcatggtatacccttcattgcccagtccggcgactttttgctcatggatgattttgaggtttttggtagttccggaagttgtcgtcacgttgacgggctccggaataatgttgtagggattggttccggcccagcagagggagcccaggaacgctgcggctagcaaaattgatttcatgcggcgcgtatggtaatggttgttgtttgtgtgaggatttaaaccctgtccctccgtcgtcaatggcgtgttccggacaaccgtgtttcgggaggaacggtgaatggcggcgtcaatctctggagggagcgcagtcccactgcggcttgacggccagtttgccggtggccccggggaagccttccggtacctggtagtctttgcggagcttgccgtacagggctttgagctctttcacggtttccgcatattccggtttgttgatgacgttgtgcatttgggccgggtccttctggttgtcaaagagcatccattcgtcgctggtccagatataggacagcgtgtagcggtccgtgcgcaggccatcatggcgcggagcgttgtgttcacccggattttcgtaaaaggcgtagtaaagagaacggtttttgaaatcctgatgttctccggtcttgaacaggggagtgaggctgcggccctggaaggtattcatattttccttggtatttaccccggccacgtcgcagaaagtgggagcataatccagttcctgcaccatggcggaggagcgcacgcccggcctgatgtggcccggccatctcatgatgaggggcatgcggaaggattcttcgaaaatccagcgcttgtcgtacaggccgtgttcgcccatgtagaatccctggtctccacagtagagcaccagcgtattcttgtccaggccgttctgtttcagatagtccatgatctggccgatgctttcgtccacggaaagaacggtgcccagatagtcttccatataatggcgccagcggcgcagcaaaatgtcgcgctgcgttttgattttcccgttcttaatatctttgacaagctgtacggtacgggccttgtggtagttgtaccaggcttccttctgttgcgggtccatgcgcacccattccggcatttcccagtcatactgagtatgcagggttttggattccgggcaggaaagcattttctggatgtcttcggggaccacctccttgatcaggtgttcgtcagaccatacgttgaaatggttgagcagggtttgttccgtcattttcaggaattccgggcggtctgcaaaatcgtcttccagattggcgggcgggtcaatggcatccgcatactgtttggcgcggcccagattctgaatggaggggcaccagcaacggtggggtgccttgtggcccacgacgagcatgaagggtttgttcttgtccctctggtccagccatttgaggcttttttgcgtaaccagttccgtggcatagccgggctccgttttcaccacgcgtttgccgtccttgccgggagtgatgaaatccggattgaaatagttgccttggccggggaaaatttcccagtaatcgaatccggtggggtcggattcatatttggacgtatctcccttggcgcccggcgggatggcttccaggtgccacttgccgacaatggccgtctggtaaccggccttttggagcattttcgggaaagtgggctgggaaccgtcaaagggagccgcatgttcgttgaagaggtacccgttcatatgggagtggcggccagtgtagatacaagcccgcgaaggtccgcacagggagttggcgcagtagctccggtcaaagaccatgccttcgtccgccagtttgcggaagtttggataaggcatgggagaatccttttcacaggtgcccagggtctggtaggaatggtcgtcggtgacaatgaccacgatgttggggcgctggtccggcgtctgcttttgaggctggtccgcggaagcggacaggggacaggccgcaagcatcagggcggtggcggcatgacggttcattgttaaaatcatgaattaaacaggcaatggttggagagggggaagcggcggaatttgtccgcaagggcattcctgccggtacggaaaagaccacatccccgaaagaaaaaatgctggaagagagttttaggaaaaataaaacatcagtttcatatttcaatacaaaaatggggatggagcggaagcccatgaataaaccgttccgcagccggacggcaggggaaaagccgttcaggtgccacgtgggccggagcgcttgttccggccgttgttttcatgggattctttctgttccaggagccatgttctatcttcaaggctgagctttttcagggatgttctgctctggtgtccgtccagctcctgaagccagagggtctgggtcttttccgaataacgggaaagtttggcgaagacggtatttccgttgactcctgtccagacccggtagcctttgggaatcagcgtttttttaaactcttcatattgctgcttcgccagtttgacgctgttcttgatctggtcaaaataaagggcgttttgtccggtataataaccgcgcaacgtatccactttggagccgtccggagacatgaccagaagcacgggcgttcctctcacgccaaacagggagggagcctttttcacatactccagcatcttctggcgcttcctgtaaacaggttcgctttcaaatttttccgcctggtcgtaacagacgcggacgacattccttttcgcccagtcttcaaattccttcgtatggaggagttctgcccccagctttttgctgggagggctgcccacggaatggtggaaccagatgagaatgggttttccggtactctgggcttcccggagggcggtgggatagctttggatccagcgttcgttttccttacgctgggcgaaagcttcttccagcccggggatgggggcgtccgggtcatgagcgtccgtgtaatagacggccccgctgtctgccctggtcatttcctcctgtgtggtggcggtaagatgggtggcctgttgctgattcggggtagtgctcaacagccccgtcggcacattggcgatggaattggtcttgttatcctgcatgtattccgaaaggcttttttttaccttcggttcttcctgttccggagaggttcccacgcaggaacagagagccgcggacgcaaacaggaacatggacagccggggcagactcatgactgacctgatagcataacagggaaaaatacgcaaccgggaattgttcaacggtcgcagcggtttcagtatttcttggcttcctgttccttctgcttccggtcccgtatggcgatatccagggggtgcatgtagcggtcgttgatgtggctcgccctgccggtgcgcagcttcttttcgtaccgtttgccccggtttctcctgaacaggaattcggactccggaacgcggcccacggtccggtagatcagctcgtcgatttcctccttttcccggtagccggcagcctgatgtagcattcctcctcccgggaatggttggggaagtagtgcaggaagtgtctcatggtccattttcatccattgaatcctgatggaaaggctgtttctggcgcttttgaacgaatgtttgctacggaagaaggaccacgtgaagtggctcatttagccggggcatgaatgctcaccaaaacgcaggccgcgagaacccgggaaaacagaaacagttccttgttatactctctatcatcagagtaatgggaaggaaatctgccgattaaaacgcgagtaataccctgttttccaaaatagccaatatattctccctgcaaataaactgttttcccatattcaaacggaaaaacgatataaagccgggaagaaaatgggttaatcccccgttttcagcaccttgatgaacgcttcctgcggaatgttgatttttccgatggccttcatgcgctttttgccttccttctgcttttccagaagtttgcgcttgcgggtgacgtccccgccgtagcatttggccgtcacgtccttgcgcatgggggagatgctttcccgggcaataatctttccgccaatgcaggcctgaatggcgacggtgaagagctggcggggaatgacgtttttcaggcgttccgccagttccctgccgcgggaggctgccttgtcctggtgaacaatcatggagaaggcatccaccggttccccggcgatgagcatgtccattttaatgagcttggcggcctgatagccggcgtattcataatccatggagccgtagcctcgcgtcatggatttgagcttgtcgttgaaatccaccagaatttccgccagagggacggtgcaggtgagcattacgcgcatatcgtcaatggtctccgtattgtccacgctgccgcgtttttccaggacaagttgcatgatatccccgatgtattccccaggaagcataatgaacaccttgacgataggttcccggatttcctgaatttcctgcggttccgggagcaggctgggattgtccacattgatttcctctccattggtcttggtgacctcataaatcacggaggggtaggtggagatgatatccatgttgaattcccggcgcagacgctcctggatgatttccatatggagcaggccaaggaagccgcaacggaacccgaagcccagagctacggaagattccgcctggaaggagaaagcggcgtcattaatctgaagcttcgccatggccgctttcagggcttcaaaatcggaggaatccaccggataaatgccggaaaagaccatggggcggatttccttgaaaccgggcaggggggatgggcaggggcgcatgtaatccgtatacgtgtccccgatcttgacatcagccgcggatttcatgttggcgatgatgtagcctacgtcgccggcttccagggaatccgttcgggtcattttgggggtgaagatacccacttccttcacttcatacacttcgtccgttgcgaaaagtttgactttcatgccgcggtgcacgctgccggaaatgacgcgcacataggagactacgccgcggtaggcgtcgtaaacggaatcgaacaccagggcgcgcagaaggccgtcctgttccgtttcaggcggagggatgcgctgaacaacggcttccagaatatcatcaatgccgatgcccatcttggcggaggcatggatggcttcctcatgggggatgcagacgatgtcctccagctggcggtatactttgggcaggttggcactgggaaggtcaatcttattgatgacggggataatggccaggttcagatccatggccaggtgcatgttggcaagtgtctgggcttccactccctgggccgcgtccacaataagaagggctccctcgcatgccgccagggaacgggacacttcataggagaaatccacatggcccggcgtatccagaagattgagcttgtaagtctttccgtccccggccttgtagaaaatggtaacggggtgggacttgatggtgatgcccttttcccgctccagatccatggcgtccagaagctgatcctgcttctcccgttcggaaatggtattcgtcttttccagcagccggtcggaaagggtggtctttccgtggtcgatgtgagcgataatggagaaattgcgagtcagttcaatggacatggtggtctctacccttctaacatgagtgccctgtgcgcggggagggtaacatagcccatgcggcggtcaagacttgaacatgactgcctcccgttccctgccgcgtcggcttcattcgctccgggaaaaccgtcattcatgacaggggctgcgccgggagattgaacgtgagggaagaaggaaggctctcaactggtacaggcacgcgaaccttttcccgtgcggccatttcttaccaagccagcatatgaaatcttttttagcagccattttaagcctatttattcccggcctcggccagttgtacaagggccactttgtccaggccattctctggttcctggtggtaggtgcggcttacggcctcctgtattggttcatctttgcactcgttcctattgtcctgcatatcatttgtattttgcaggcctatttcatggacaatgaatgatgcctgccgtttcggcttcacggccaggatggccgaaagagcagagcatcctgcgcaccggcagcggcattcattccctgaggttgcggaaggaatgcgccgttcatagcggcgtcattcttcttgataccggtatttgcaatgttaacgggtttgttggtgccagtggaatccgcggattcttttttaacggacttcgatttgtttacaggggaaacgtcagcacaactgttttgaatttgttaatgaccccgtctgtcttgaaaaatcggatcggatgggagacgttgattcttcaacaaataggattttgaatccggtatcaataaaaaaaattggtggtaagaaaattatagaaatcaatattttgttcttaccgatattctatctataatttttgatatattatttattgtaattttttaacaataaatattttatcgataaattcggattcaaaatccgctatctccgttttatagttactaacattagtaaacgatggaaaaaatactgggaaccacaattgtattgctgggggctgccgctctttccgcaacggccgcaaccgtccagattgatctgtcagggtatgattcaggaagcgatgttaattcttccttccaagcctaccgtggcgatccttccgccatggcgaatcacttgaatgagtggttggcgaattcttccggatggtgcggatctaaagccaatacatcttctgaaacctcaagttattttaaaagcgctgttgggagcgaagacggttctgtaacggtgacctataccaatagacggggatatggcggttccggcgtaggcctcaaagtttccctggatgctgcggggtattctgctgatgctttttcttctctgacattcacagtggatttggctacctccaccggcggcacttatcgggtttatctggcctaccagacggaaaatggctggcaggcggtagagtcgcaggcgacgtccggcacgattactgtgacggcagatctttccggaaacaaactgacttctgaaaacgtttatgtattcgttgagtcaaatcagggaaggggtaatgattctacattcacggcttccatgacgggagaattggcttcagtgccggaacctgccacggcttccctgggactgctgggactggccgccctgatgatgcgccgtcgccggtcttaaggcatcctgccggcagacaaattaatcataggacggtctccgcatggaggccgtcttttttatttttactggagggggataacagaatgcaatgtaccgggaatcgagtattcccggctatggaaagaaaaactgcccggaaaattatttttcgccatgcttcaggtttattcttccaaatagagaggccgggatgtttttgttcttcatccggatgttatctttgtttctggaaatttttttacagagcaggtttcctctggaaatgaatgagaaattgtttcctaattgatcatctgccggatacaatggtttccgcaacagaaatgttgatatcttggccgtttgttcttgtaaaacgtcatttgaattaatcatcctttttggaaacaggccaaaggaataatcttccgataaacaaaaactcagagccgttccggaattattccggaacggctctggagggccaggaggaaggcttttcgggggtgggtggggtgccttctccttgggttttctttcttttagaagtcgtagcggtagccgacgcttccgttgaccgagctggacccgtcacggatgtccgcgttcccgttcacgtagatggttcccttcgttcccaccggcacgcttaaccccgctcccagctgcagcgccgtcgttcccgttttcgcccctctcacgctttgcgcgaagccggggttgcccagcagggagacgttcgtttcccctctccggtctcccaggtcctgcgccgcgttgacccggatttccgccagcgattcccggccgaagatgttgctgcccaccagacccatccaacggccgcccagcgccagcgtccccgtcgtccagtcctgccggccgacgttcaggcccgcgttgcccgctcccgtttcctcatagccgtccatccgcgtcgtcaccaccgaggcgttgaacagcggctgcagcacgctgctgcggttttcgtcgaggtagatgtcgcaggtgagttcgtacatcgctccaagaccccacccgctggtgcttccctgcgtcccgtagcttccttccccgtagttgaccgtacggttgagtttcgcgtcgttccaccctcccgtcaggatgagcgtgtgcgcccagcgtttgttctggtagcgcccgaagaggctggcgtagtagctgtccaggcgcccgtcggcgctgtccgccgcgccggccgtcaggtcgccgtagccggccgtgaaggccgctcccaccgtgaggcggtcgctgaggtccgcgtccacgcctaccgtgcctccccaggtggtgagctggtagccgctttcatccccgcgggtgtccagtttggcgtaggagcccgtgccttccatccacatgtggaagcgggggaggtcgtcgttgacgtaggccgggttgacgcccatgagggtggtccggttcctgatccagcccatctggtcgcgcagggcgtccctctgtgccgtcccaagcgcgttgaccgtgctcccagccgccgccgccatggcgcgggaggctccggagaggttgccgtcattgatcatggtgctgacgccgttcatgaattgggccagctgggagtcggggtccaggtttttgcgggcttcccagagcaggctggctccggcggcggagttccacgtgtcggccgcggaggcgaagaggttttcctgccggagtgtggcattgagcaggatgtcgtttccgtcgcggctcagtgtggcgtcctggtagtagacggcgaagaggccggatatccgggcggcgaggctctgcccgtcttccaggccgctgatgctgccggtagcgctcatcaggacgacgtcatggaggtcgctccccgcgttcatggcggcgtttccttccatgttggagaggaggaagccggctccgtcctgcacggtgatggtgcccgccgtcagcatgggggcgccaaagggggcgtcctggttgaagttgtagatcagttccgtcgtggagccgttctggaaggtgatgttttccacgttgagcgtggtgttggcgctgccctgggcgtccccggtggcttcaatacgcagggtgccgttgtttccggcggtgatgctgttgtagttcagcgtgggggcgtccgcggcgcctttcaggaccaggacgcctccgtcacggacggcgaggtcgtagtccttattgccggtttgcaggtattgggtggcttgcccggagatgtccagggtgccgctgcctgccagcgtgccggagaaggttccggaggaggttgttgccgaggagatggagaggcggcctccgttcatggacagggtgccgctgccggagaggctgctgatggtgccggattccgttccggtgagggccagcgtgccgtcggcggtgactgaggttccgtccagccgggcttctccgcccagagccagttccgctccttcccggatacggagggagccggttccggtgatggagccgtcgtttatttcgcctgttccagtcaggttgagagttccctggatggtcagggagcctccggcttccgtgccggtgatggttccgacttcggcgttgccgttaatggtcaggccgcctccttccagagtgagggtgtccagggtgtttgacgcgccgttgaggacgatgtttccttcacgcagggcgagggtttccacgtccatcgttcctccgaccgtcagcgtcccggttccttccttgatgaaggcgacgttgttgcctcccgtgatgctgccgcccatgacggtgtcctggccggccgggtcgatgtcgtcttctcccgtcgtcatttgtttgttgttgaggatgacgacggccgtgccgtctccggtgttgttgacgactaggctgctgcccgtggctcccatcaggttgttgattttagctccctgtccgtcggattcgcccggggctccggccaggttgaccgtcagggtctggccgccgccgatgacgacgccggcgtagccggagagcgtttgataggagttgacttcatgggcgtttcctccttcctcctgcacgcggtagaggccggtggccgctccgctgagcaccaggcttcctccgtccgttccggtgacccggatgccgtagttggacagaaggtcggtcgtgaaggcgatgtcgcccaggtcgccgacggtcagcgttccgctggtcagggtcaggtagctggaggagtcgtcggttttgtggtccagcagaaggttgacgacggcgtcgttgctcaggtccagcgtcagcccttccccctttatggacaggttcgggtcgcttcccgttccgctgccgttgctgatgacggcgccagacgcctgcgtgtcctggccgatgttttccgttcccagggcgatggtcagtccgtccaggcctccttctcctacggttacggttccgctgactccggtgagacgggagccggaggcgatgttccacgttcctttcatatggctgccgccggcgccggagaggttcaggctgccttccgagatggtgattccttccgtggttccgtcaaggatggtttccgctcctgccgcgtccgccccgagtgtcagggttcccgctcccgttttggtcagggccgggctgtcggtcagcgcgtagatggtggccgaggctccttcctgcgcgatattgatttcatcaaaccgggtgaaggtgacgttttggaagtccccggttccaaaggttcccttgagttccagcgtcctgtttccttcgaccgccgctccggcgcttccgccgatggtgatgccgctttgttccccttccgccccaaagacgcttcctcccgtcagcgagacgaggacgtcgcctcctgccgtgcctttatttcctgctccataaatgtttccccggtaggcgcctgttccgagttctaccgtgatattgcctgcagtggtcatggtgctgcctgtgtttcctggcactttggagtaggagccaccgtagatgttgccggtgaaggtggagcctccgctaatggagatggaggaatttcctccaatcgtgtattgggcctggcctgaattttcaaaggaacccccaatgatgtcccccgtgaaggtgattccttccctgccgatgatggaaacggaggtgtctccgttgatgttgttgaccgttccggcgttgtttacattgccataactgccgccaatgattgttttgacgaagctgttgtgttcctctgttccggaaagcgtgattccgttcaggttgattgtagccgacgtgctgccttgaatcgttgttccggaagtggtattgcttgaccaggagcttcctccgatgatgtatgagttggagagtcccccatccaggttctgggccgtgttggaatattggacattggttaccagcacgctcgtgttgcccgtgatggtggtgacggcgttgtgggcggaggtgctcccgccgatgatggctcccgccacgatggcgttatccttgacggtaacgttggtgtttcccgtcagggtagtgcttgctcccttgttgttcccgccgatgacgtgttccgccgtggcgtcgccggaaagctgcacatgggtgtccccagtcagcgtgctggtctggagtttggtgctccattcattggtgacacctccggcgatgatgccgaatgctcctccgttgatgtccatccagatgtccccctggtagttgaggttgccggacggcagggtcgccccgctgttgtataccccggacaggttgattttagtttcgccggtgttggtgatttgatagactttgtccccgctggtcgtcagggtcccgttcagatatcccaggctgacgttggccgctctcccctccccaagagccagcgtaaaggcgttcttgaccgtttcttccaattcccctcccgctcccgcagatacccacgtcacacgggatatcgccccgtcttctatcgtcagcacgctgccttctattctatattgccctgtctctaagcccaatacggtaaaattcgtaccaaggttgttccctaaatcaaacgtgtatccctgctctccctctaccaggctgtcaagcgcgccgccgatgtcaatggtgcctgaagtgaaagttacattttccttggtaaaggaggaaccggattccgtataggttagcttggctccgtcaattgctgcgtttttcaatatgccggtgccgttcatgttcagaacggaatttgcccccagagtggcggaggtgaaatccagcgttcctcccgccatggtgattattccggaataggccagggaagaattgttgattttcaaggtgccaccttgggccgtaatattcgcgttgatgacggatcccgtcaggttttgcgtgcctgttccggccataatcagatttattcctcccgtgggagtagtgttgccgtttactccggaatgctgcgtggttgccccgatacttcccccatacgtgtaatttccgttgcccgtcagggtaagattcgctctggaggaattagccgactggacgcgtcctttatgtgttccgctgaagccgtcagcatcatttaaaccggccagagaggcggcattggaaatttgcaacgtcagggcgctggaactttgattgattgagcctgacaaatctaccgttgcgttggcgagagccgttcccgtaatctggagaatggccccgccgggctgcgtccccttctgggaaaggataatgttcccggaaaaactgctttcctgggaaccaagcacaaacttggaggcatagccggcattgccgttagccgctaccagcgtcaaatttccttctccggcaaatgccccgttcaaattgatggtacaggcgccgttcgtattctgattaatggtaaacgaggagcctgctccgatataaagtcctgtggaataattgttgtttcctgaatttacatcaaggttgacggattggctcccagtaactgaatactcattggcgggctcattgttattaaaggtggagttcgctccccatgcgggggattcagatgttgggacggccagggaaacactggtgtaacaagccagaacagccgccagcagggtaataggcagatggagacgcattataaaaatattagatgttaattttttatgtatataacggattgaaaattcgatgtcaagttgaaaataccagttcccggattctcatacttttactgtaagtgcattatgattttttaaatttctaaaatgggattttcaccttttcatttacctccccccttgaagcaaggggaggtatactataagactttcattttgaatataaaatatcaaattttatattgcatgggccaatattggaatcatcgccgaattttcaatccgcttttcctcttttcgtgaaataacgcggagaagacataaaaaagaccgccccccggaaacggggagcggcccttgaagtgtgggtggagagaacaggttagcgttcgttgtcgaagttgatggtatcgttcaacatgtcttcggcaagttccgccgcttcctcttcttcgctggccgacgcgatttcttctgcgccctctgcgggttccacttcaatcttgctgtaacgggagaatccggtgccggcgggaatgaggtggcccatgatgacgttttccttgaagccttccagcgtatcggtcttgccgagggtggatgcttccgtcagaacgcgcgtggtatcctggaaggatgccgcggaaatgaaggattccgtttccagggaggccttcgtgatgccgagcagaacgggcttggctgcggccggttggcctccctgggctacggtttgttcattgatgcggtcgaacgtagtcttgtccacctggtctccccacaggaattcggtattgccgggttccgtgatgactaccttgcgaagcatctggcgcacgatgatttccacatgcttgtcgttgatttccacaccctggaggcggtacacttcctgaacttcgttgacgaggtgttcctgaaggcgttccttgccgcagacatccagaatttcttccggagagacggggccttccgtaagctggtcgcccagatgcacatggtcgtcttcatgaacgataacgtgcttgttcatcggaaccagatgatccaccagttcgcccgtgggtgtttcaatggtaatgaccttcttgccgcgggaggtattcttgctgctgaggcgcacaatgccctccacgcgtgcaatggtgcaggcatccttgggcttgcgggcttcgaacagttccgccacgcggggcagaccgccggtgatgtccttcgtcttggctaccttgcggggcgtcttggccaccatcgtgccggcggagatggtttccccgtccttcacggtgaggttggcgcctgcgggaatggcatgatgagccagaacttcacgggtcttggcatcgcggatgaccacctgcgggtgaagttcctgcttgtgttccatgacgacaagggaggaggctccggtttcccggtccgtttccttggaaacggtgatgccgacgatcatatccttgaattcgacgatgccgcccttttctgcaatcacgggtacgttgtacggatcccaagtggcgagggtttcatccttcttgatagcgccgccgttgggcacgtacaggatggtgccgatgacgggctggtaggattccagttcgcggccctgttcgttttcgatgcggacggagcagtttttattcagaacgacaaagttgccgtctgcgttttccaccgtgcggagatcttccgtgtagatgacgcggccgtcgttcttggctttcacaatgggctgcttgaacgccgtggtggccgttccgcccacgtggaacgtacgcatggtgagctgcgtgccgggttcgccgatggactgggcggcaataatgccgaccgcttccccgatcttcacttcctgtccggtggccaggttcaggccgtagcacttggcgcagcagcctttcttgagttcgcaggtgagcacggaacggattttcagccgttcaatgccgattttttccagttgttccgcctgcttttcgttaatgaggtcgttgatgtccacgataacctcgccgctgacggggtcaacgatgcgttcgcaggaagtccggccgtagatacgggaggcaagggacgccacttcttcgtcgccgtcataaatggcgtgaacggtgatgccgttgctggtgccgcagtcttccgcatggacgatgacatcctgggccacgtccacgagtttgcgggtcatgtagccggagtccgccgttttcagggcggtatccgccagacccttgcgagcgccgtgggtggagatgaagtattccagcacggaaaggccttcacggaagttggccgtgatggggcgttcgataatttcgccgctgggtttcgccatcaaaccgcgcatgccggagagctgcttgatctgcgccttgttgcctcgggcgccggagtccaccatcatgaagagcgggctggccatcttggagccttcgttgtgttccagcttgcggtacagagccgcctggatgacatccgtagtctgggtccagatgtccaccaccttctggtagcgttccccatccgtgatgataccgttcttatactggcgggtcaccttgtccagttccgcataggctttttcaatttccgtctttttctgggagggaaccaccatgtccacgatgccgatggagcagccggaacgggttgcttccttgaagcccaggtttttcagggcgtccagagtctgtacggtacgttccttgccgacggtctggtagcagcgccagatgatgtcgcccatctgtttcttgcctacgttgcggttaatgtaaccgagttcccggggccagatttcattgaaacgcacgcgtccggcagtagtgatgataaccttcttggtgacatccccatacaccacttcggaaggctttttaccgtagtccgggttgtgcaggcggatccagtcatggtagccgattttgcgggcggcaatggcgtattccacctcgtcgatggattcgaagaggggaagatggtgatgattatcctgattgttctgcacttccgcagcacgggtgtgtgtcaggaagtacgcgcccagaatgatgtcctgcgtgggtgtggcaatgggcttgccggaggcaggcgagaaaatattattgggcgccagcatgagctggcgggcttccatctgcgcttccacggacagaggcacatgtacagccatctggtcgccgtcgaagtccgcgttgtacgcattacagacgagcgggtgcagacggatggcggagccttcaatcagaaccggttcaaaagcctggatggagaggcggtgcagggtgggcgcgcggttgagcatgaccgggtggcccttggtcacttcttccaggatatcccacacctccggcgtcttgcggtcaatgagcttcttggcggagcgcaccgtgtgcacgtagcccagctctttcagacggtggatgatgaagggctcaaacagaatgagcgccatcttcttgggaagaccgcactggttgagtttcaattccggaccgataacgataacggagcggccggagtagtccacgcgcttgccgagcaggttctggcggaaacggcctcccttgcccttcagcatgtcggagagggatttgagggggcggttgccggcgccggtgacggcacgaccgtggcggccgttgtcaaacagggcatccacggcttcctgaagcatgcgtttttcattacggatgatgacttccggcgttttgaggctcaggagggttttcaggcgattgttgcggttgatgacgcggcggtacaggtcattcaggtcagacgttgcgaaacgaccgccttccaggggaaccagcgggcgcaggtccggaggaatgacgggcagaacgttcaaaatcatccattccgggcgcgtgttggactgaaggaacccctgggccagtttcagacgcttggcaatcttgcgtttgttctgtttggagttggtattgtccagctgttcctgaagatccgcgacgagggtgggcagatcaatggccgccagcattttctggatggcttccgcgcccatgccggcttcaaagctgtcatagccgtattcgtcttccgcattgcggaattcttcttccgtcaggatggcccccttttccagaggggtacttccgggatctaccacgatgtagtcttcatagtaaatcacgcgttccaaatggcgggccgtcatgtccagcataaggccgatgcggctgggcatgcatttgtaaaaccagatgtgggagaccggaacggccagttcaatgtggcccattcgttcgcggcgcacgcgcgcgttggttacttccacgccgcagcggtcgcaggtgatgcccttatgcttgatgcgcttgtacttgccgcaggcgcattccatgtctcgggtgggcccgaagatgcgttcgcagaacaggccgcctttttccggcttgaacgtgcggtagttgatggtttccgggttgacgacttcaccgaatgaccagctgcggatggtatccggatccgccacggtgatggcaacctggtcaaaggtccggggcttgtcgctcaggccgtgcatttccctgatggtgggggtgtcagacatatattgaaagtttaaaggaggtttggtgcccgcccccgcgttttgcggcgcgggggcggaatgcggtggatattagaatttgaggtcggagaagtcgacgtccgccaggccggccatgtcgtcgctgtcaaagccttccgtcatgccgtccacaggagtgagatccgtgccgccgagttgcagggagggttgttcatccttgtttccggggcgtacgttcagccccagggactgcatttccttcatcagaacgttgaaggattccggagttccggcttccagggtattatcccccttcacgatggattcgtaaatgcgggtacggccctgaacgtcgtcggacttgacggtgagaagctcctggagggtataggcggcgccataggcttccagcgcccacacttccatttccccgaaacgctggccgccgtattgggccttgccgcccaggggctgctgcgtgaccaggctgtacggacccacggcacgggcgtgaatcttgtccgccaccaggtggttcagtttgagcatgtaggtctggcctaccaccaccgggttatggaaaggttcgccggtcaggccgtcataaagagtactcttccctcccacggtgccgtccttgccgtcaccgatccaggtgaaaccgtccaccttcttggcttcggacatgtaattccagatggtttcttcactgatgccgtcgaacaccggggtagccaccttgaagccaagggccctggcagcgatgccgaggtgggcttcaagcacctgtcccacattcattcgggaaggcacgcccaaggggttcagcacgatgtccaccggagtgccgtccgcgaggaaaggcatatcctgttccggaacgattttggcgacaacgcccttgttgccgtggcggccggccatcttgtcacccacaccgagcttgcgcttggcggcgatgtatactttgacttctttcagtccgccgggttcggattcgtctccggattccatctgatccagtcggtgttcccgttcgtcatccagttccgtaaagcggccttcaaaggaggtgatgatttccagaatcttgttgcggatcgggctgggctcgatttcgatgtggtcgtgaaccagggccagcttgcgcagcagggtcttggtgattttccggttggccgggatgatgatttcaccggtctgttcgttgacgacgtccaacgggattttttcgcccagaagaatgtcggagagcttcttggtcaactggtcaataagctgctctttcttcttcttgtgttcgtcgttgattttcttgaactgctttttcttctccgcgctgtccacgacgaggtcgccgcggtggtggccggagcctgtggaagaaatgcgcacgtccatcacaatgccggtgcagccggagggaacgcggagggatgtatctttcacttctgcggccttttcaccgaagatggcgcgaaggaggcgttcttccggggccagttccgtttccgatttaggcgtaattttgccgacgagaatgtcgccgggcttcacttccgcgccgatgcggatgacaccgtcatggtccaggtttttcagggcttcatcaccggcgttcgggatatcacgggtgatttcttccgggcccagcttggtatcacgggcctgcacttcaaactcggagatgtggatggaggtgaaggtgtcttccttcacggttttttcggagatgacaatagcgtcttcgaagttgtaaccgttccacggcatgtaggccaccagaacattgcggccgagggccagttcgccctggtccgtgttcgggccgtccgccagcacgtcgccggttttgattttgtcgccgcggcgcacgatcggacgctggttgatgcaggttccggcattggaacgcatgaacttgcgcaggggatagacgtaaactccattgtcgcggtccgtgcgcacactgtcgggatcagacaggaacacttccgggcgcacgggcagttccccgtcttttgtggtgataatgacttcagccgtggcggaggccacgatgccgtccgcttccgccagaacgacggaacgggagtccctggcgcactttccttcgataccggttcccacgtatggagattccgctaccatcagaggcacgccctggcgctgcatgttggagcccatcagggcgcggttggcgtcgtcatgttccaggaaggggataagaccggcggcgatggaaacgagctgcttgggagaaacgtccatgtaatgcacgtctgccggatccacttcgatgaattcgcctttttcacgggcggttacgcgggaggtcgtgaagttgccctgttcgtccagcgggttgttggcctgggcgatgagatagccttcttcctgatcggcggtgacgtattcgatggtattggtgacccggccgttttccaccttgcggtaaggcgtttcaatgaacccgaattcattgatgcgggcgtaggtgcacatggagttgattaggccgatgttggggccttccggcgtttcaatggggcaaatgcgcccgtagtgggagggatgcacgtcccggacttcaaaaccggcccggtcacggttcaggccgccgggccccaaggcggaaagacggcgcttgtgcgtcaactccgcaagggggttgatctgatccatgaattgggagagctgggagcggccgaagaaatcgcgcacgacggcgctgagggccttcggattgataagtttgctgggcgtgacgccttcaatgttctggtcaatgagggtcatgcgttccttgaccaggcgttcggtgcgggcgaggcctacgcggcactgattggccatgagttcgcctacggcacgtacgcggcggctgcccaggtggtcgatgtcgtccaccatgccttcgcccttcttgagacgcaggaggtatttgagggcggccaggaaatcttccgccgtcatcaggcgctggtccagactggtgtccagtccgagtttctggttgattttgtagcgccccacgcgggtgaggtcgtatttcttgggatcgtcaaaaagcctcttaagcagggtgcgtgcctgagcggcagtagcgggatctccgggacgcaggcgtttgtagatttccttgagggcggattcttcgtcgtgagcgggatccttcttcagggttttaatcagcacgtcgtcctcgctctggtcaatgacgtcgattttcttgatgccgaactggaggagctggcgaaccacacccatattgagctgttcgaaagccttggcaagaaccagatccttgtccttgatcgtgtccacagccacaaggttgtgcagatcttcttccgtcatgtcttcgctcaggggaagcgtgcggatgttgtagaactggctgacgatgtcgcggtccgttttgaagcccaggtagcgcataaacgtcgtcgcaaggaatttgcggcggcggcggcggcgatcaaggtaaacgtaaagcaggtcgttggtgtcaaactgaacctccagccaggagccccgatccgggatgatgcggaaggagtggagcagtttcccgttcaggtgctgggcgctttcaaaacaaatgcccggggaacggtggagctgggacacgatgacgcgttcggcaccgttgatgacaaaggtgccgcggttggtcatcatggggagttctcccatatagaccgtttcttccttggactcgttgtcggatttgagcttgaaggtgacttgaagggcggcgctgtaggtttcccccgcgcggatggcctcgtaatcgctcatcttcggctgttcaatgtcataggagacgaagtcgagctcaatgttttcgtcatagctcttgataggaaagatttccttcagaacgccttgtaacccgatgtttttcctagccgcggccggcgtgtcctgttgtagaaaatcgaagtatgattgaagttgaatctcaataaggttcggaggttcgatgacttccttgatattcccgaagtagagtcgctttgacatgggctgctgtggcggagatgttatggtttgcatcctgaagaacccggatgccgggttgggcggttctttccctgggggacggaaccgactggaagcgttttacgaaataaaaggcctctagtcggtcacgcgggatgtgaagacgaggaagcgcaacaggagaaaaacggcttttctcctgttgcgcgggaagtaaaaagcttacttgacgtctaccttggcgccagcttcttccagcttggccttggcggcgttagcttcgtccttggagactgcttccaggatgacggcgggagtgccttcaaccagtttcttggcgtccaccaggccgagaccggccttcacttcgcggacggccttaattacggcgatcttgttggcgccggcttccgtcaggacgacgttgaattcggtcttctcttcttcagcttcggcaggagcggcggcagcgccggcggcagctacgggagcagcggcggaaacgccccacttttcttccaggagcttgacgaggtcggcagcttccaagatggtaagggtgccgagttcttcagcgattttgttaatatcagccattgtattattttctagtttggtttcgagtcgcgccaagagccaacttggcatttcagttctccggccggagttccgacaaggaacctgtaggagagtcgggtccggttttcacacatttggctagagtgcaaccggaccgtccggtcaaggggttggtattaggcggcgggttcttcgctgccgccgttttctttgtccacatatgcctgaataactcgggcaagagcggaaccggccgcgttgatggtgccaaggagtttggcaagcaactgatcgcggggaggcagttcgccgatggcgcggatttcgtccgcggaaagaatggctccatccaggatcgccaccttgtattcggctttcttggaagccttggcaaaggtgttgatggccttggcggcgcctgctacgtcggacgcgccggtcacgaaagcggtctggccgacgaggtgttctccgatgtcgggaaggccggcatccgtcagagccgtgcgcatgaagttgttcttggctacgtggcactgagcgccgcaggcggccagggcggaacgcagattggtgaactcaggcacggtgatcgaggtgtagtccacgacgatcaggaacggggaggcgttgacgcgagcggtcaggtcgtcaatgatgatacgcttgtcaggattcatggtgtgctaaatcggttcgggttacagtttggcgatggaagcggtgtcaaccggcagaccggggcacatggcgcatgaaacggtgacagattcaatgtaggcgcccttggcggaagccgggcgggccttgacgacggaatcaatcagggcagcgatgttttcggcgatgctttcgttggagaaagacagcttgcctacagcggcggagatattggcgttcttgtcaaccttgtagtcaacgcggccggccttcacttccttcacagccttggccgtatcgtccgtgacggtaccggttttcgggttgggcatcaggccgcgcggacccagtacacgggcaaccttgcgaacctccgtcatggcgtcgggggtggcaatggccgtatcaaagtcaacaaatcctccctggactttcttgatgagatcttcaaaccccacgaattcggctccggcttcctgggcggccttggcggcatcgccctgagcgaagacgaggacgcggacgtttttacccgtgccgttaggcagggaaacgctgccgcgaaccatctggtcggatttgcgggggtccacagtcaggtggaaggagacggtgacggtcgggtcgaatttcggtgccgggaaggatttcatggtttccacggcttccgtgatgctgtagttcttgttagggataacaagcttggctgcttcttgatatcgcttgctgcgtttggtagacatgtgtgtatttggcagtgcgttcggactggtttaatcctcctgcggtgagtgttacataccttcaacttcaatgcccatctggcgagcctggccggcaagaatgcgggcggcgcgttcagggtctttcgtgttgaggtcagggagtttggtgttgacaacttccatcagcttggccttggaaagagtggcgactttctttttgttcggttcgccggaaccggaggcgatgcctgcggctttcttgagaagtacgctgcccgggggctgcttggtgatgaaagaaaatgacttgtccttgtaaaccgtgatgacggtcggcaggagatcgccggcctgcttttgcgtggcggcgttgaactccttgcagaatgccatgatgtttacaccggcctgaccaagtgccggacccacgggcggggaggggttagcggctccggcattgatctggagcttgatgattttggttatttcttttgccatggttttgctttgttagcggagaaaataaacgggaagggggctgatggggggagacgcaaagaagattcaggctttttccacctgccagtattccaggtccacaggcgtggcacggccaaaaatggagacgctgacacgaagcttgcccttttccgggtcgatttcttcgatggtgccttcctggctctggaacgggccttcgcacacgcgcacagggtcgccgacggcgaattccaccttgggacgagcggcaacggcttccgcatccaacaggggcagaaggtcttccacctcgcgcttgcgcatggggaggggggcgttgcgggagccggcaatgctgatgacaccgtcaatttgctggataaagtaccaaagatccttgttcagggtgccgtccgcttccagcaggtacatgttggcataaacgtacccgggaaagagtttgctgtgacgttccgtttttttgccgttgcgcacttcggaaataagttccgtggggacttccacccggtaaatgaagtcggaaagctcggcgtccttcgccttgcggatgatgcggtcacgaacgctgttttcctgtccggagaggacgtgaaggacataccattgttcgtgaggctctggggtactgggcatgatcggagaaagaagtggggagagtaaaactagattgccaactggatgagatagttgaccacgctgtgaagaaaaatgtcgaacgatgcaacaaacgcgccaaggaataccatggcaatcagtacgacgagagtggaaccccagagttcgcggaattttttgaaacctttcaccttggggtcgctttcccagggccaggtcgtcttcttaagttcgcccttaacttcggcgatgaattgagaaatcttgcgaaacatgcttcaaggtggggtggtgtatttggaaagaagtggcaggtcaggagggactcgaacccccaacttttggttttggagaccaacgctctaccaattgaactactgacctgttggagtctcttctttcgtgggaaatgagggggcctgcggggaggccccctcattaaacctgatgtagattcctctacaagttcctgaggaacttagtcaaggatttcgctgatacgaccggcacccacggtgcggccgccttcgcggatagcgaatcgcatggctttttccatggcgatcggagtgatgagctggacttccaggttgacgttgtcgccgggcatcaccatttccacaccttcgggaagggtgcagcaaccggtcacgtccgttgtacggaagtagaactgcgggcggtagttgttgaagaacggagtgtgacggccgccttcttccttggtcaggacgtaaacttctgccttgaagtttttgtggggcttcacggtgccgggcttgatgattacctggccgcgttcgatatcttccttcttcaggccgcggaggagcagaccaacgttgtcgccggcctggccttcgtcaagcaacttacggaacatttcgatgtccgtaacggcggttttctgggtgtccttgatgccgatgatttccacttcttccatcttcttgatgacgccgcgttcgatacggccggtagccacggtgccgcggccggagatggagaatacgtcttccacaggcatgaggaagggctggtctacaggacgttcgggctgcgggatgtaggagtcaacagcggccataagttccatgatggattcttcggcagcggcgtcgccttccagagccttaacggcggaacccttaataatgggggtgtcgtcgcccgggaattcgtattcgttgagaagttcgcggatttccatttccacgagttcaagcaggtcgggatcgtcaaccaggtcgcacttgttcatgtaaacgacaatggcgggaacgcccacctggcgggcaaggaggatgtgttcgcgggtctgcggcatcgggccgtcggaagcggcaaccacaaggatggcgccgtccatctgggcagcgccggtgatcatgtttttcacatagtcggcgtgtccggggcagtcaacgtgggcatagtggcggttttccgtttcgtattcaacgtgagccgtggagatggtgatgccgcgttcgcgttcttcgggggcggcgtcaatctgatcatagccgcgtgcttcggcgaaacccttcttagcgagcactgaagtaatggcggcggtaagggaggttttgccgtggtcaacgtgaccgatggtgcccacgttcacgtggggcttgttgcgctggaattgctctttagccataatattatgtttaggtttgggctgctatgggtctagcttgaagatggagcttctggcgggaattgaacccgcgacctcatccttaccaaggatgcgctctacccctgagctacagaagcatagacttcttccgcctttcgctgctcctagagaagtcgtaaatccgcccaaacctgcggttctagcggataaatagcatcctcccgtgttgcctgacgaaaagcggacgctatgttacgtttttagatgcgggatgtcaatgaaaacatgaacattttttcagctttatgccgcaaatacagggagtccatgtataatatatttatcaggaatgtgttgaatgtttggatctgtttaaatcctccgtcaatttaagattggggtcaacgtcttcatccagagagtggaacagtcctctgcgggctttgagacaggtgacataagcgatcatggcggcattatccgtcgtcaggtcgaagtccgggagaaccagttccactttttcacggtcacaggcggttttcaggcgggaacgcagctccctgttgcaggagacgcccccggagatggaaagggtgcggtgaccggaggcgcgcaaggctttcagcgccttgtgaatcaggacgtccgtcacggcccgctggaaagaagcgcagaggtcgcgcagagtttgccgggtcaggccgtgaggatcgccgtttttcgtaattttgggcagtgtatagagaacggccgttttcaggccggagaaagatacgttggctgtatgctccttcatcagggcccgggggaaagaaaaggcttccgggtcgccttccgccgccaagcggtcgatttccggccctccgggatagggaaggcctagcattttgcctaccttgtcaaaggcttcccctgctgcgtcgtccagagagcggcccagcaggcggtagttccctacgccgcgcacatccacaaaaagggtgtgacctccggaaacgaccatgcccagatggggaacgggaccgccggggcgtttgaggaagggggaaagcagatggccttccagatgattgacggagacgaagggcctgcccgatgccaaagccagagccttggccgtgctgttgcctaccagaagcgcagctaccaggccggggcctcccgtagcgccgaagacgtcaatgtccgcaggaactgttccggcttcgcggcaagcggtccggatgattccgggaagatccgctgaatggttgcgggaagccagttccggcactacgccgccgtgctggcggtgaatggcaatttgggaggagatgacggaggagagtatttccggagctttttcctctccggcagaacgcaggatggcgactgccgtttcatcacaggaggattctattcccagaacggtaagggattccggcatggaggaagaacagggaggggaggttaggaggcctggtggatttgggccggcttgttgccggtaaccgttgccctggtaatggtaacggtatccgcattcttcatgctgggcactttgtacatgacgtccagcatgagggtttcaaagatggaacgcagagcgcgggctcccgtgccgcgtttcatggcttcggcggccatggctttcagggcgtccggctgcacgtccagtttggcgccgtacatggcgagcagtttggaatattgcttgaccagggcgtttttgggttccgtaagaaggcggacgagctggttttcatccagcttggagagcggacagaagatgggcaggcgtcccacgaattccggaatcatgccgaaggagaagaggtcttccggcatggcctgtgccagtatttcctcttccgaatattccttgcggtcgcgttgttccgtgatggctccgaatcccatctgggtggcgccgaggcgtttgcggatgatgtcttccaggccgacgaaagcgccgcccacaatgaagaggattttttccgtattgacgcggatgtattcctgttgcgggtgcttgcggcctccggtgggaggaacattgcagatggtgccttcaatgattttcagcagagcctgctgcacgccttccccggagacgtccctcgtaacggagacattttgtgttttgcgtccgattttgtcgatttcatccacatagatgatgccctgttccgctttcgctacatcaaagttggcagcctgaagcaggcgcaggatgatgttttccacatcttctcctacgtaaccggcttccgtcagcgtggtggcgtccacaatgcagaacgggacgttgagcattttcgccagcgttttcgccagcagggttttccctgaaccggtggggccggccagcaggatgttggatttttcaatttccacatcgtccagggacttgtcttccagcatgacggcgctttggcgcaggcgcatgtagtggttgtacacggctacggaaagcactttcttggcgtagtcctgcccgatgacatactggttgagcgtggcgcacatttcttccggggtgggcagcgggccttcgtaggaggccgggccggccgccgtttccctgagcatgtccgcggctgccgccttgcgggcttccgcctggcacatggcgtacgcggagggttccatgttcaggatgccgcggatgaaacgggttgccatcggaaggcctgtgtccttcacaatcatgttgacgcaaatttcaacgcaattgttgcagatgtaaaagtcttccgcaatctggatgagtttgtccaccttgttcccgggcttgccgcagcaggaacaggcaggaagatgaggggtggaaccggacatggtttttcaggtagagagagaaatggcggagggaaagggtcaggccttggtctttttcttgtcgccctggtcatcagagtgatgcgccagaattttatcaaccaggccgtaggccacggcttcctcagcagtcatgtagttgtcgcggtcagcatccttttcaatttgcttttccgtcttaccggtatgtttggccagaatgccgttgaggcgttttttgaggttgaacatgaagccgatggtgcgttccacatctgaagcggttccctgggcacctccggaaacctggtgaatcataacgtgggagttcggcagacagaagcgtttgccgggagttcctgcagccagaaggacggaacccatggaggccgctatgcccaggcaatatgtatttacgtcacaagagacgaattgcatcgtatcgtaaatcgcgagacccgccgtgacggatcctccgggggagttgatgtagacgtggatgtcttttttcgggtcagccatctgaaggaacagaagctgggcaatgacggaattcgccacatcgtcgtcaatagcggagccgatgaagataacgcggtctttcaggagacgggagtaaatgtcaaaggcgcgttcgccgcggccgtcctgctccaccaccatgggcacataataggagtttgcgggggttgatttggaagattggtcttgaaacatgtttatggaagattggatgttgttttttcaatgtatgttacccgtccgcaggacgcaaaacgggggagtcgggcatgtgtgcgccaactccccctggtaaggtgttttgtgcagaggaggggttactgctcgtctaccgttactttggcctcttttgtcaggaagtccagaaccttggctgtcagcaggctcattctgatgccatgcacacggccttcgcgctggagttcgcgaatgtaggatttgaggttctttttctgctggcgggcctggcgggccacttcgttgtaaagctccatttccgtgacggcaattttttctacctgcgccacttcctgaagcatgaagaagaccttgaggttgcgcttggcctcctgtttggcttcttcccgggcttcctccacaaacttatccatgtctgccggggcatttccgctgtacatggcctgctgcattttctgctggaggatgccgtacacttcacgttctacgacagcttccggaaggttgaagtcaagcatgtccgccagcttttccgtgatctgatcggccttggcttcatcaatttgcatggctttgcgctgggccaggttttccttcagggcagttttcaattcttccaggtttttgccgggaagaactttttccgcaaaagcgtcatccatggccggaagctgtttttcccgtacttctttcacagtggcatggaatacgagttccttgccgcgcagctccgtaattgggaaggtatccggaatcgtgacggtgatatccttgctgtcaccggcattcaggccttccagggcagaggcgaagccgggcagaaattgatcgtcttccaccttcatccactggccgtcacggccttccaggaagcctacgggtttgcctacggcttccgctacgggcttgccgtccaacgtggttttgaagtcgataatcgctacgtcgtcttttttggcagcgcggtccacaggggtgaattccgcgatttgttcagccagggagttcagagcttcctctacgtctgcttccgttacttcggaagagggaaccttgacttcgatgcctttgtattccggcaattcaaattcgggaaccacggtcatcgtgctggtagcggtgtagttgccctggtcatccagagattgttccggctttccgaagttgagcactttcaatttggggttttcttccagagcggtggagcaggccgtttcaaaaagggtgtccagcagttcttcttcaatttctttcttgaagcgcttttcaatgatggacttgggtgttttgccggggcggaagccgggaagcttggctttggcggcataggaatctacaatggaggcgcggcgcgcagccgtggtttctgcggggatggaagctttcagcgtggctgtgcagtccggttgaatatcaacgttgatttccataaataatacggtcagtgttaattgaaagtggttctgtttcagctccgggatggcggcagcggtcaaaacacgagcggcgacaactttaatgagagggtatctggagtgcaagctattgcacgggaatgacacaattgtcctcctgagcgcgcatgcgcacgcggcgtaagagaatacggggcaactgtgttctacgtggaatcacgtcttgactatgcaagaggaaaagtcctttatatcccaagcattaagttcagcgctcatgatccgtcccgtttttttgtgtgtttcctttcccttgatagcgtgttcggctgttttggcccaggatgaaacttcccttaacagaggcgcctatggttccgtgatgactccggaacaggtaatgcgggaactggggccgggcacggggcttcttcccggtgaccaggcgtatgaggggcggcctgtgaagagcgtttccgtgcggtacagaagcaccggcaagaccgtgtccgaagaccgtctgaaaaatttgctggctacgcagccgggcaccagttattccccggaagtggttaacaaggacttggaacggttgttggaaagcggtctggtaggcggcaatacaacagtagccgtggagccttccggcgacggcgtggcggtggtgtttgaaatggcggcccagaatctgctgggcggcgtggggttccgcggcaataccgcgttcgacaacagggacctctccgaggaatgcgggctgaaggggggggaagctctcagcgacaaggccctgagcagcgctattgccaagctgcgcacttattaccaggaagcccgatatccggatgtacgtgtttcctatttttaccagaaaacggaacggcccggctttgtggatgtggtcttcgacattaacgaaggaaagaaggccaatattatcaagattgactttgtgggcaatgaacacatcagcgccaaggatctccgacaggtgatgaaaaccaaggagaagggctggctgacctggattaccaaatccggacgcattgaccgtgaacaagtggaggacgatctggcggaattggtgacttattaccgtaataaaggttatctgcgcgtcaagctggacaaggtggaatattttgacgccggcaaaggcaatgagcagaagctgacgatgagaattacccttaccgaggggcgccgctacaaggtcaaccaggttgccttcggccccaccaaggtgtttacggcccaggaactgattcccggcctgagcatgtacaacggggatacctattccgcccagaaagtggccgacgacgtgacgatgatccgccgttattacggttcccgggggtatgcggacgcctccgtgcgtccggacattcaggaagtgggcgttgatcccaagacaggttacggacaaatcaacatcgtgtaccatgtgacggaaggcaatccctaccgcgtaggcaatatccgcctgaccgggaataaccgcacgaaggattacgtcatccgccaggaacttcccctccagtccaatgaccccatgaacgccgtggatttggataccgcccagaagcgcctccagaacctgaactattttgacatggtggacgtagcccaggtgggatccacgcggcccggctaccgtgatatcaatatcgaggtggcggaaaaacgtacggggtccctgaatatcggcgtggcattttcctctattgaaagcgtttacctgttcgcaggcatcacccagtccaattttgacatgtatgactggtcctctttcgtgggcggcggccagcgtttcgcgattaacgcccgtgtcggttttgaaacgcaggatgccagtatttcctgggtggatccgtggttcctgcaccgcaagctggccttcgggacggaaatcttctacagcaattccacatatttttccgattattacgaccagcagaactatggctttgccatttctctccgcaagccgatcggggaactggattacgtgaaactggaataccgcctggaacagtaccgtattgacgccgaagggaacgcccctatcttcttctggcaacaggacggagactacctgcgcagccatgtggaactttcctacaccattgatacccgcgacgcgcagatttttccccgcaagggaggcaaatttgaagtgctggccggttattccggcctgggcggcgatgtgcatacatacaatttcggcgtgaatggctcctattactggaatttgcgcggagacaccattttcagcatcaatgccggtgcggctaccgtggattcctatggcaaccacgatgtgcccatttttgagcgcctctacctcggcgggccatacaacatgcgcggtttccgtttccgggacgtggcgccgtacaatcccgccctgagcggtgatgagacgatgggcggccgttcctccttcttctgccagtttgaatattccattcctgtgattgaagaagtgcgcgtcgcggtgttttatgacatcggttttgtcaacggagattcttttgacttcagcacgtccaaaatagtttccgactacgggatcggcctgcgcctgaacctgcccatcggtccgctggcagtggactatgccattccgattcagaagaacaacgccattgaccgcggaggacaattccagttctatctcaattattcctattaattacgtttgataatttctctaccgtttgacgacatgagtaatttccgcattcttatcctggcgtttctggtggtggtgctggctgttctgggaatgatttatgtgaatatttcttcaagaatggatgtgattcagcaacagcagcagatggcctccactccggcacctgtcaatccctccccgtatcttccgatgcccacgcaggctcctgcttccgccgttcagccggtggtggtggcggatcctgtagtgagcgaggaactggctcatgtttcggcggagctggaacggatgaagaaggagaatgaagaactgaagaagcgccatgccctagcggaggaagaacgcgatctgttggaacgccagaatatggaaaagggagatccccggctgcaatggcttaatgaaatcaaggatgcggagcaggtgggccgtgtgacggaatactaccgtgacgccaacctggtcctgttccagtccatcggccagcctgacttgaaagtggggcaggaactgggaatccgcagacgcgggagcatttttgtatccctgattatcgacggagttgacccggacgggaaggtgttccagtcttacgtgaagcgtaatacgctttttgataataatgacaaggaacccatcaagccgggggatgaagtcattgttccgcctgcgagctggcaggaaaacatgacggaagaagacaagtccggtatggcttctccctccacccccgtccccgtggaagctcccaaaccggtgatgattcccatggagccgtgatgcggatccgtatttagccaagccaagtaaagagaagtgcacctgagagaaagattgcaatcgggcgccggtcccagcctgtcctttgaatttttcccgcccaaaaacgagcaggcagcatcggccttgtaccagactatccgtgaactggagccttaccgccccagtttcgtcagcgtgacgtatggtgcagggggctccacccgcgagcttacccgcgaagtggtgttgcgcatccagcatgaatcccgtattcctacggtgccccaccttacttgcgtagggcatagccgggaggaggtatggaatatcctggaccaatacgcccgggctggagtgcgggccgttcttgcacttcggggagatcctccccggggagcgaaggattacaaccgcgatgcggatgtttttcgccatgcggcggatctggtgacgtttatccgtgaatataatgaatccggccgtcacccggatccggatggattcgccataggcgtggccggcttcccggaaggtcatccggccactcccaaccgtctgcgcgagatggatttcctgaaagccaaggtggatgccggcgcggattatatctgcacccagctgttttttgacaatcattcttttttggattaccgggaacgctgtctgctggccggcatcaaggtgcctatcctggcgggaatcatgcctgtgaccagcctgtccggcatgaaccgcatggcagagctttccggaggcacctgttttccggccaggctgcttaaggcgctgaagcgtgcgggttccaatccggacgctattcaggaggtaggcatccaatacgcctccagccagtgcgccgaactgttggattccgatgtggacggcattcatttttatacgcttaaccagagccgggcaacgcgggaaatttacaggaatctgggactgaaggattccctgcagcttttggaacatggcgaagataagtaaaaagctgattgatttggttgggacaacacggtagaaccctcttcaacatattatggatatcaaggatattaaacgggccatggacaatatgccgatgggcgacggaagtgcgtttgcggaaatttccgtcggcccggccaagcatgaacagtttttggatgaacattacggcaaggttgcgctggttgtgttgctatgcgtccttggggctgccggatggattatttataatggcgtgcaggattccatggaaagaaaggcaggcgccgctctggtggccgctatgccggaatccccggcaaccggggaaatttccctggacgaacaggggcttcagcaggtggtggctgactttgacagttcccgcgccgccgtcactgcctcttaccttcaggccattgccttgtggaacgccggcaaggaggatgaaggcgtggccaaaatgaaagcttttattgattccgctcccacggaggaatggaaagcccaggcttccgttaccctggcctgccgtctgatgaaccgggggaaagcggatgaggcggaagggttgttccgttccgtggtggatgcgggagatcctactttttccggttttgccaccatgtgcctgggggacattgcccgggctaagaaagacaatgccgccgcaggcgccttttaccgtgaactggcggagaaatttccggccagtgcatttgccttgcagagcggaggctacctgctgcgcaagagcctgtttgatattcagagtcccgttcgtattgagcccgcagtagaacagaaataatccatgcgggcgtttccgaagttttccggaagatgaacgctttttccatccgcatgtctgtttttttacagtgcatgcggatttccgtattcaggaacgccggaacaggggggtaatgaaaagcctgctgcgcgcgtagctgttatgattccgggaattccgttcaggactgtgacatatttaaacaaatcatcaagggattccgcgcttaccggatgtaaccgggctgccggtgttaatccttattttttatctcatgaacaggcatattaaatcattctggcttcttcccctggcgggaatgacgctttctttcatgccgtcctgcacgacggacagctacgggaacagttccgtaacgcccggtggagccgccgccatcggtgtgggggcgctggctgccggcgctgctattggggcggctgtccagcatgaccgtgacaaggacaggtaccgcaatgactggcgccaccataatcctcctcctccgcctccccgtccgcctcatcgcccccaatggcggaggtaagaagggagcgtgcgtgtaagggcggcgatattttggttcggcagggggccgggaggcgacgcgtttttccggtctgcccctttgctgaaatctcagacccgccgtatgccgcggagcgcccaggtcatgcgttgtctggcgctttccggatcattgaggatagaacccagcaagtcgagaacgggccgagctgctttggagtcgtgcacttggagctgtccggaaaggataaagggggctcccccgcagcagacaaggtaaatgaggatgttcatggggtctcccatgagcacggatccttcctgctgggcttcccgtatggtttccagcagcacaaggggatggcgcgtatggattcctgaaatgaaacggatggccgcctgttcccctgccagggcgtccagaaccagctgggcaatgaattggccgtgacgcagcaggaactccatgacgtctcccaggatggcttccagtttttcaaaggccggaagatgaatgttggcatgggtcctgatgccggtgaacagaggttcgtaccagcgttccagaagctcggtcagaaaagcttcccggttgccgaagtgatagacaaagctccctgtattggtgccggcccgcagggacaggccgcgaacggtaagggcgcgcagcccggattccccgacaatcatggcacccgtattgagcaggtgctctctggtggatttccgtttgggcatgaaggtgaagcttgaacctccatgtgtgccccttatcggcctgcaaggcaaggactcgttatgtctgttgctgtaaaaagcggaaccggggctcatcctctccccggtcccgccgccggagtcctgaatgaatcaggaggttgctttcaattccttccgccgggaggcaatccagcgggagaagagtttggccgtggccggaatgataagcaggttcaggatggtggctgtcaccagcccgccgaactggacgatggccagggggccgagcagttcgcctccgggctggtcaatggcccagatcagcgggagcagccccagcacggtagtcagggaagtcatgatgatggggaccacgcgttccagagaaccttcccgtatggcttccgcgggttccatcccctgatgttccagggcccggtacctgttgagcagaatcaggccgctgcggatggcgaagccgatgacggtcacgaaccccacaatggaagccacggaaagaatgggaggaatgtaagttcctccaaacagggaggacagcgtaccgggggaggcaaggaaaacggctacgatgccgcccaccaggcacagcggtatgttcaccagagtcagcatggcgcgccggacgctccccagtgcggaggaaaggagcagcacgatgagcaccatgacgatggcgcccaggacgtaaagccgttgtgatgcggattcccgtgctttgatagtgccgtcatagtctacggtacagcccatggcgttcattaccgggtccaattgttcccgacaggctttcgcgaggtctcccaggttggaattgggggagggattgcaggaaatcatggctttccgcatggtgttgtccctcaggatgaggttggaaacttcctcccggtacacctgtgccacgtcgtccaggcgcacggtttttttattgggggaaatgagttccaggtttttgacatcttccatggacgttttaagtctggggtcaatgcgcaggacaatgttccaatggtcctggtttttgatgacttctcccagtttctgtccgttcatagccgtggaaacctgttccgcagcattcgccatggtcaggccgtaggaagccagggcttcctgattgtattgcacgcgaatggtatccaccataatttcccggttggcgcgtgcatccgccacttccggcatgttctccagaatttccttggctttccgggccgccaggcggagctggggcagctccgtgccgtaaatgttgatggcgatttccgagttggagccggacagagcggaactgatgcgatgggccagcggatagccgatcatggagctggtgccggggatgccgtcaatgcatttcttgatggcggcgcgcaattctttctggtctttcttcagatccacgcgcacgagcagctcggaggcgctgacgggttctgcgtgttcgtcgttttccgcgcgtcccgtgcgctgggtgacactgagaacccccggaatctgttcaatatctttcatcactttccgggagatgcgctccgtttcatccagggaagttcccggcaccgtgctgacgaagactgtgtagcaatcctcgttgaacggcggcaggaaactggttccgaacgtggaacccagccacagggccagcagcgtaatggccgtcatgatggcgcagaccgttttggaaaagcgcaggcagaattccaggatgggggcataaatgcgtttaatgaggcgggagctgaaggaatccccgctttccagagtagcggcgtttttgcttttcttgaaccatatgtaacagagaaccggagtaatggtgacagctacaataagagaagaaagcagggccagcatgtaggagatccccaggggccggaaaaactggccttccagaccggacaggaagagcaccggagtgaataccagcaggatgatgacggaggagaaggaaatggagcctacgatttcgctcttggctttcatcagaacctcatacttgctcttgcgcttatctttcggcagggcggcgttcctgttcaggtgcctccaggctatttccacgaagataatggcgttgtccaccacgtctcccacggctacggcaaggccgcccagggtcatgatgttgatggccagcccgaaggcggggaacatcatcatcccgaacaggatggacaggggcatggaaatcagcgtgatgatggccgtgcgaaggttcagcagcgtcaggaagatgacgatcatgaccaccgctccggcaatgaggagggtttccgtgccgttatccagggacatttcaataaaatccgcctgccgataggctgcggtgtgcagtttcattcccttgggaagctggctttgactgaattccctgacggctgcatccacggcctgtgtcagggccagagtattggctcccggcaccttctgcacggaaagcactacggcgtcttcccccataaatccggcatctccccgccgcggcgcaccgtctatcttgacttccgtcacatcctggagccggagtattccggaggcatggtccggaaccagggcgcggttgagctgttcaatattggcggtgcgggtatcctgctggatggggagttcctgcccggctacatcctccagataccctgcggggacggaagattgggattcctgaatagccgttttcaggctggaaaggtccaccccggccagtttgagtttgttgggatcataaatcacctggtattccggcagacgcccgcccagcaccgtgacctgccccaccccgggaatggccagcaggcgcgtgcgcagcttgtattccgccagttgcctcatgtccagctgggaggtatccttgtctccagtcagggcgatgagcatgatttcccccgttatggagacgatgggggccagctccggggatgtcccttccggcagggattcccggactgctccaagacgttccgttacaatctgccgggcctggtagatatctttgttccagtcgaaatccacccatacgaaggaaagcccgctgccggaggaggagcggacgcctttgactccggcggttccgttcatggcggactcaatgggaatggtgatgtattgttccacttcttccgcagtaaggccgggggcttccgtctggatggtgacacgcgggaccttcagttccgggaatacgtccacgggaatgttcttcaccacgaaaatgctgatgatggccagcgcaatcgtcagcaggatcacagtaatcctgttgttcaggcagaatgaaatgagaaagttcatggattctgattgctgaatacctaagattcaaaggtttattccaaggaaatccgggatatttgttccttaatcttttattttgtacatcgtttagtgttctccttcgtggaactggccgtccgcgtggaagtgcccggctgcttttttgcttccggcctctccggtgggcaggatgtatttcaattcatacccgcccttggtgacgatggtctgtcccggcatcaaccccttgacgggcgtttttccctgccgggaaggcagtgtttccacctttttcatgacaaatgtgtcgtttcccgccttgatgaaaaccacgtcgttcacccctaccttaacgacggcactattggggacgggaatgaagccctccgcagcggcgtcatgggagtacaggtccagccgggccagctggccggcatgcgtcccttccggtatgcggtccggggtaaaatacagggcccgggactgggtggcgggatctacctgttcggccaccctcagggagccgttcagcagttccgtgtttttaccgctggtcagggccagccgggcttttgcataatggacgggatccgtcccataaatggtcgtggtaaattccagatcccctttattggtcatgacgagggcaggcgcgccctgttctccccaggcgccctgggtcatgttcacggactgaacggaaccatccgccgctgcgtatatgtaaagaaggttatttttcaatacgccggactccatcaccagtttcaatttattgttgctggcgttcagggcagcccggaggctgtggatttccgcctctttgaattggatggaagtattcagttcgctgttgcgggtaccgattttttccaactgggcccggcgttccctgagggttccgagttctgctgcggcgcggtccagcgcggccctggcctgggaagcgtttccttccatttccacaatatccggggatgccagtgtatacagcagttctcctttgcgcacttgttgtgcggatttgacgttgaatgtcacgcgccctgcggcgggaagggcgtatgtggttaccgcatggggaggaatgaccatctgcccgtgaagggttttcgccgctccgtgggatgtttcctccactttctcaaagcgcatgtccagagaatggcgcgctttttcatccacatgcacgggaatcatgtctcccggttggccggaatttttttccgcagactcctcgcgttcatggttgcccgtgcaggcttccccttccgcgtgctggtgaccttccagttcatggtcgcctgtgcagacggccccgtccgcatgcctgtgttcttcatgggcgtggccctgagtacaggtttccccagccttgtgctgatggtcgtcatggccgtggtccgccgtgcaggcggaaccgtcctcatgtttgtgttccgcaggggcaggctgttctccgcgtgcggaatggagacagaaagcaggagccagtcccagcatgatggaaaaataaagatgtttcatattcattaaagatggtggaagattgatgtggattaaaggttggcgtgggtgaggtagcggagctgggcctgaacggccagaagcttgtccagattgtccaggaaagccaggcggctttcgtaaagctggtggcggttttccgccagttccagcagggatgcttccccaatgccgtgcagcttttccatggtccggacggaggcggcgaaggattccatgcgctggagttccgtgcggcagtggcggagtgccatctgctggctggcgtcaagctggcgggcgttgaataattccgttttccaaagctggatggtttcctgtctggacaagtcccgtgtgcctcgggcttccgcaatggccttgcgattgcggttccaaaggggaagattgaaccctatttctccgcctacttccttttctccttcgtcgcgggtgaaggagggaccgagctccagttccgggtactgccggcggatttccgttttgaataatgtctccgtggtggcgtaggtcgccagttgtgccttgatttttggagaggcggtcaaggctgaagggccgggagccggtacggcggcgggaagctggaaattctgtttcgtcaggaaaccgagtttccgtaccgcagaaggatgcaggcccatcagcttgacgagttccattttttgctccaattccgtttccgtcacggtttggagttcccggatagcgtcattcatccgctgggaggctacctgccgagaggaaaaatccacttcccccgcgccgataagctgttcaatcatgccgttttcccgccggatggcattcagccgttcccggatgaccgtcttgcggcgctgggtaacggccagtttgctccatgcctggtccagggaactgagaaaatccagttcagcctggcggagggtccagaagtcggcctccttgtattgttccgccacctttttttccagggcggggaggccggttacgggaatggtgaagcccaggctgccggacatgttgaccgtattttcctggaggacttgttcaatatcccaggaaaaggagggatcgttccaccagcccgattgcctggctacttcattgctggaagccagtttcagccgggctttgttcagatccggattcatgaccaggccgatctggcgagcctggttctgagtgattgaggtaggggaatctacgctggacgcctctttccaggaggcttcctccgcgttcaggtcgataggcgcgctgtggtagacgctgcatgagctgagcagggctgccaggcctattccggcgaagaatggtgtggatttcatgatggaaaagataataaaaacagttcggtccaatcaggtttggacaatgcggcgaataattccgcggaaacaaataaaagcggccgccgtattaaaggcagcgtaccgcaggaaacgcccttaaggacgtttctaaaaagagccgttaaatcagcaggggaagttgaaagccttcatgcgtcgggccggtattcctgaaggggtcagggggaaccggtgttgcggaatccgatgtttggcttattaaaagaagaggccgggccagatggtggaaatccggcaatgtctgccagatgacgtaaggctggggcagaggtgcatgaggaacgggaaccgtcagatcattaatctccagctgccggtgttcgcagaggtgcccggccagagggctggaagagccggtgcggggcacatcgtccccgtggcattcgcagggggcggcatcctgatggcaggaacaggaaaaaatgaaaatttcttcatgacacgggcacacggaaaccatacccgttccgcctacgacgaccagcagaagggtgagcagcatgatgccggtgcgcaatgctctaaccatggtatgccgcgaatcctagaaaggagccgtgaaagcgtcaagagcaaaagtggcggatgtctgaaccctgaaggaaaggccgttatttttccgccgctttgcggagcaggtccacggtgtgttcaaaagccacgccgcggacatcaatgatccgggagttttccgcgattgctccggtgatttcctcccggaattttccggactgttcttccgtgagcaggtttttggaactcagggagcgcgtgatgagctggaggacgtaccctgtttccacgaaagactggcgtcccacggcttttttcatggcttccatgaattccggggcgtgttcgggcggcaggccggccacggccttttcataagcgcggatgaaggaatccaccggggctttggaaacttccgtcttagtgaggtcaaagctggattgataagcgagagctccttcttccgccagttgaagggcgtttttcccgaatttgttgacggcagtcatatccgctcctttttccagcagcagggccgccacctggaaattaccgcgcatggctgccagcatgaggggcgtaaagccgttgccctcccggttgttgatgtctgctttcctttcaatcagcatgtcggacaggcggtccagcccgctccaggaagcccagtgcagcgcggtccacccgtccttgtcctttcggtcgatttccacgcgggggtcttccagaagccggtccagatagggggcccgagtggcttccagcttcagcgtggtctcaatgttgttgtagttggcgtagcatacccacatgacaggagttctgccatggggatccgtcatgttgacaaaagcctttccttctgccgcagccagttcttccccttccttcagggtttgttcgaattccttcatccccttgactcgggcttccttctcctcctgttcggaggaagcgttgacttctttggcctccgctttcttcattacggtgataaggtccagggccgggttgggatctccggagaaagatttggagaccaacaggctgagaccgccgaggagggagctgaaagctaccaggatgagggaatccacaatgatgttgcgcgtgtgctggttcatggtctcgtaagttcaggagttggcttccgtaaattcttccgccgtcagggcgggatccgtttccgcttcaatggcgctgatgggtggcgatgccgcgtcttcctcgggatggtccgaggtgatggtcctgcgggtcatgataatggcgatggggctgattacggccatggccaggtaaatggtccacatgaattccggggagtcccagaagccgatgtgcccggtatccatcttggcgcagatgccgtcatagcagaggtaggcgacgagcaggccgccgatgatgccattgatgggtttggcgatgaacatgggaagcgccgccagagacatgtaggaggccactttgtctttcggagctacccgcgccacatattcggagaagcggggggagaagagcagttccccgaatgcgaataccaggatctgcgccacaatggctaccagatacgcctgagagcgcgtttcaatgccgggcaccaggtagtaccattcaatgggaatggccatgaaaacgagagagaaagcggagatggacatgcccgcaatcatgaggccaacggtagagaagcggcccagcaccggaatgagcaggatgaggccggagacgatgatggccgggttgacggcattgatggagcctatggcaaagtcgtcatatagcgtacgcacgtagtatttgggcatcaccaggaattgcagcgtgaaaacgatgcgcacgcccatggtcagcacaaggaagaggataagtttgcggaaggcggattccttccacacctccatgaagagctggagaggtctgcggaggggggcattgatgttcgcctcccgttcgctgggttccgagtagttgtcttcattaataaaacgggtggtgatgcagcccagcagcaccatcagcgttccgaagttgataatccagtatccgccgtccacggcgccgaagtgcttgcggaaaaattcaatcaggaacacgttcgcgatgacggcggaaatgttcatcagcaggtagtagatattgaagcccgtggaacgcgctttcagcggagtgaagcgccggatggaagtctggatgacgggggacatgaacgccgtgccgaaggacataatcagaatgcccgtcatgacggccagccttccggagtccacggttgggctgaggtccggaccgaagcccatgataaggcgcccggcaatgaggatgatgaagccgattaggtaagtgcgccgtatgccgatgatgtcgcagatggaacccaccgcgaagacgaaggcggagatgaaaagggtgtacaggcctacccagagggcggcgtccgcatcgttgaagctgcaatagtccgtcaggtagagaacgaataccgtaatcatggaaaaataggccattccgtcgaagaactggacgacgttggtaagccagaaatccttggatacggttttcaggatcttgaattccgaaaaatatttgaggatggggtttgcggactcattcatggagagatggaaacggtaaggaaaagttgacgacgatgaaagagtgggttacacgcatccccgtttcaagatttttttctcccaaaggccggtttgaccggaaaaatgcgcttcatcgccggggaaaccgctatctgggcagaatgcgtcggaagcctgccacgtggcaccatgacaacgctttcaggcattgttccacagccatggcgtccgaaggcagcacgggccacagcccggcttccttcagccctgatttggctatttccgccgctttccattcgcggaactgggagggaagggcggagaaagtgaaaaaggcccagcaggccagcccgatggccagcgcgatctggaatttcaacagtccggccgtcagcattcccagcaggataagagctgtgaaaaaaggaatcatcgtggcgcgcgcagaggcggttttgcgggcttttgccgcctccgggtcttcccggaccaggctgctcatggcccaggtatgggctacgcaggccagccggcctgcggtcaccttgccttcccatgacggaggaaggctgatgaatccgttttcatccactccgggaaaccgggctttctccagtttccgctggcgtttttccgcaccgtccaggcggtggattaatcccgccgggccggggaagccgggcagttcccgggattcgtaggtgcgcaggggaatgatgcctttggtgaaacgcagcgcggcaatgacaccgagcacgaccacggaaaggaaaatcactactgcgaatagcatagacggttttttctcatatgcccgtgtgtccgtcaatctctccggctggcatgaagccgtccttcccggccagcagccgggtacgggtgcggacatcgttttttccttcttttcccgcccggaacgcttggaaaacggagggatggagcttatgtcggaatgatctgcagttccgggtgttcctctgggcgggcacaacattccggcatggattttcttcatgccggaggcgctggatttgggttgattttccggcgtttttcatgtaatggctgaccgcaatggtccatattcgggaatgcatgaggaggtggctgccgtttgtcataatggcggcctccctgggtgtgtctcccgcccaggatgtagcgagccccgatgccgcggatctggatttggacctggtcaaactgaaaagtggccccaagggcagacagagggaagccatgaggaaggtcctcctgcttgtgcatctgaagcaaaaggaaacgtggctggcggaatccacgggggatgaggccgtgcatctggcggcggagatttccttccgccggtatttggcttcagtggatatgggcggatgcccgggggaattcaagtgcgctttcctgcggtatgcaaagctcctgaattcctttgaagaaaaagatttgaatagtgtcgcggattttcctgcggtccctctgcaggctgccggaagagagctgttccgggtgctgcttacttaccgtctggagccggagcatctgctggaggaaatgaaagcgctggtggatgaggaaattgagggtaaggaggagctgtctgcaggacagatgatggatattgtccggggaatgcgggaagccctgcaatccggaagccgcccctttccggcggaaaggcctccggaagacagggtttccgggatgtagcggcttttcatggatggcatgccggtaccgtgaggaatcttgtggaggcatgccggaaagtccgctccggctattccggaaggaaaatggattaagacggctgtacgtcacggtttccaggcggcggccatcagagtctggaaatggggcgggtccggctccctgtccacaatatccgtgtggatgttccggaatcccgcttcctttagcatgctttccagggcggcgggcgtgaagcccagccagcggtccgcgtaaagttcacgggcttcctcctgtccatgctggagcagatccagcaccaccaggcaaccgccggatttcaggatatcccacgcagcttccagcgctctggacggcttttgcgcatggtgcagggcctggctgagcagggccagatccaccgtgccgggtttaatgggcggcgcttcgatatcgcccaggcggtattccagattgtccagcccgtgtttgcgcgccagctcctgccccagctccaccatgctgggggagttgtctacggcgatcacctgtttggcgctgggggagatgagctgggaaacgaaaccttccccggctcccaggtccgccactacgtcatagttcagaatgcggagcagagcaccggccagcgctttccaggaacggccgggcgcgtagttcttgcccagacggcacactacttcgtcaaaataggcctgggtgcggtttttgcgcttgtccaggataacctgaagggcttttttgtccgtttccgcctccggcaattcctcgcaggctttcagggctacgttgtgcagatcacctgccagggaaagagtgtaaaagacgtttttgccggaacgggcgtcctccaccatcccttcctgccggagctgggccagctgggtggaaatgcggctttgccccatgccgagaatttcctgaagttccgcgacgctcagggattcttcattcagaacgttgatgatgcgcaggcgggtgggatctgccaggagtttgagcgtttttagggttgacttcatagcggaataatatatcaacacatcgagatttatcgatatgagtagaaacacccctcacatctttacgtcggaatccgttggagaaggccatccggacaaggtggccgactacatttccgactctattttagacgcctgcctggctcaagacaaaactagccgcgttgcatgtgaaacgttggtgaagagcaatatggtcatcattgccggagagctgacgaccaaagcggtgatcgatccggaaaaaatcgcccgccaggccattcgggagatcgggtactgcaacaggcaggacgacgacgttttccatgcggataccgtctttttcacgaatttgctcacggaacagtccccggatattgcccagggagtggacgcccgggaggcggagggcaagggccatgcggagcagggcgccggagaccagggcattatgttcggcttcgcaacgaatgagacgccggagctgcttccggcccccatcgtgtttgcgcataaactgctcattgagctggccaggaggcgcaagcgcgggcatgtggactggctgcgcccggactgcaagtcccaggtggctgtggcctatgacgaagacgggcgtcccgcgcatattgaaaacgtagttatttccacccagcacacggaagacgtggaccatgacacgatttactcatattgcgtcaaactcattaaaaatgtgcttcctgcggagcttctggatgagaggacggaatatttcatcaaccccaccgggaaattcgtcgtgggcggtccccacggggattccggcctgacgggccgcaaaattattgtggacacatacggcggcatggggcgccacggcggcggagccttttccgggaaagacccgtccaaggtggaccgttccgccgcgtatatgtgccgctgggttgccaagcacattgtggctgccggactggcggacaaatgtgaattgcaggtggcttacgccattggctaccccgctccggtttccatccgggtggatacgttcggtaccgggaaagtggaggaaatatccattgaaaatgcgctggaaaacatcttttccttcaagcccgcggatatggtgaaacagctgaatctgcttcagcctatttaccggaagacgacgcactacgggcatttcactaatccggaactgccctgggaacagctggacgaaacgcgcctggccttcctgaaacaacttcttcattaatcctacgacaacgcttacagacatgttttcagaaacggaacaatacaaggtgcgcgatatcggcctggcggatttcggacgcaaggaactggatattgcggagcatgagatgcccggcctgatggccgtgcgcgaaaagtacgctgccgccagacccctggagggcgtgcgcatcatgggctccctgcacatgacggtgcagacggccgtgctgatagaaacgctgacggctctgggcgcttccgtccgctgggcgagctgcaacattttctccacccaggaccacgccgccgccgccatcgccaaatccggcacccccgttttcgcctggaagggggaaacgctgcgggaatactgggactgtacgtggaaggccatgaactttccggacgggctggggccgcagctgattgtggacgacggcggagacgccaccctgcttatccaccgcgggtatgaaatggaagaaggctccgactgggtggataccccgtcggaatcggaagaagaggaagtcatcaaggctctgttgaaaaaaattgccgaggcgactccgggtatttttcatcgctggcttcccgagctgaaaggcgtttccgaggaaacgaccaccggcgtgcaccgcctgtaccagatgcaggcagccggccgtctgctgattccggccatcaacgtaaacgattccgtaaccaagtccaagtttgacaacctgtacggttgccgtgagtcccttgtggacggcatcaagcgcgccacggacgtgatggttgccggcaaagtggccgtcgtctgcggctacggggacgtgggcaagggctgcgcccagtccctgcgcggcatgggagcccaggtggtcgtgacggaaatagaccccatctgcgcccttcaggcagccatggaaggctaccgcgtgctgacggtggaagacacgctgggctgggcggatatttacgtgaccaccacgggaaactgcaacatcatccgcatcgaacacatggaaaagatgaaggaccaggctattgtctgcaacatcggccatttcgacaatgaaatccaggtacacaagctccagacgtatcccggcatcaggcatcttaacatcaaaccccaggtggaccgctacacgttcccgtccggcaacagcctgtacctgctggcggaaggcaggctggtcaacctgggctgcgctacgggccatcccagcttcgtgatgtccaacagcttcgccaaccaggtgctagcccagctggaattgtggaatacccgtaaagaccgttccgtgggcgtggaagtgctgcccaaggtgctggatgaggaagtggcgcggctgcacctcgccaagatagggtgcaagctgactgtcctgcgtccggagcaggcggactacatcggcgttccggtggaaggtccttacaagccggacttttacaggtattaaccttgtcaaggttttcttttcccggccgttccgcgcaggcctgtccggcggaacggcttttttgttttcccgatgatggagggaagcaggataacggtacgtttattttttttcctgttttttatgcaggttccctgctgttagtgaaaaaaaggaagactttttatccggtctttaatgttcaaatacctttgcagcaggcaaaacgggagcaatcttggaatgctgaccagccagagcctcggcctgcattgcagaatgttccaaaaccatttgagtttggtaagaaggctgttatcgaatgaagcataggggaagagcaggagccttctctgttccgcctgaatcagactcatcaggcgatcggcggcctggtatgttatttccccggacttatgctttccgtatacctctttcatgatcattatccaggttgttatcaggaattccgatctcttgatcaggattgtcctggggttcccgctcttaaaattgcagatattactgttgtgtctccgatagtacgaacaccgtttgccggatgcgaccatgcctgattttttcaaataggcgcgcatggacagcattgtatcgtccgcaatgccgggccctgaaggcaaatattcgaagtcgctgaacaaagacctgtggtacatggcatttccgccaaaacagctgtaaacatgggaaatgtcaaaaatacattccctgtagggtttgacgacgacggaatctgaatctggcaacatgcgtccataagcgggttgtccatcttcatcgatttcattataagaatggcagtaaaccagatgaccgggatattgttccgccagagatgccaacgaggagatcctgtcttcccgtgcgatgtcatcgccgtcaaacttgataatccattccccccgggacaaatgaacggcacattgcaaattccctgcaattccccggttgctttcgttacggtggagaataatacgccgtccttctccctctttttccaccatttcttccaggcattcaaaagaaccgtcctgagaaaaatcgtccgaaataattatttcccattctcctggataatcctgttttaaaatagcccggaactgttccttgataaaacgtttctgattgtaacaaagaagaatggctgaaatcatgaaatcgaataaacagtttaagtttttttaaactgtctaaaaataacgaattccaaattcgattggggaattccaaatccgctgtaattaaaaagagattgcgtgcggttgtttctgcatgacaggagagcctcttcgtagaaaggaaataaaactgatgatcaataattttctttgaaatacggactttccggcaggtatggatgtttctgccggaatgggaattgatggggttacccggatggaatcatgaagacggaagattccggtcattggggaagcttattttcagaagttcctttctttcaaaatttaaccttgactccggatttggaatccgtgtaatatgccccgcactctttttactgtgcgtgcactcagagagcaaatccctttttttcaataatttatgttgaagggtacggtttgtttctcaacatcaaacggccatggatacttcttcccggaaaacgtctcttgttgtattgttcaaccatcagtatgaacgtaacattccggtaatcagagagctttattcaagacgcttttccgggttgcttcaattaatgccctactacaagggagatgcccctgacgtatgttccgtcttcgggaattctttccagttctataattatattttgcagtccagggaaagaatcaggcagttggagggcgattattttcttattatcggagacgatcttcttttaaatcccaggtttgacgaattttcaacgccgtccctgctgggaatccatggggaggatacgtgttaccttgacggttttgtggacgtttctctgccggtgtgttaccggggaacggcggaagcccaccatttttccataacccctcccggtattgatgcggaaagcgtcaacaggaacgttccgtcctatgaggaggccaggcggattttaaaatccaggaacctcatgcggcatgatgaattgtcgcgcgtacgcatgtttctgcccaaatggagccccggggggattcatgcgaattggaaagtgttgaagggcagggtatggcatctgctgaattactggaagcaccggattaaaaaataccagtattcctatcctgtcgttttcggatattcggacattgtctgcattccgaaagggaaattagacgatttctgtcgtatccttgaagtgttctccgcatggaacatgtttgtggagctggccattcccacggcgttgcagcttcttcccggaacaaagctgtctacgctggaggacacgcagtacaagtcgggaaacgtctggtttccccaggatccggaacactttgaagccatgaatgccgtcattgacgggctcgtgtcctcttccggaggagacctcagcgagctgcttgcctcctttccggaggaatacctgtatctccatcccgtgaaattgtcccgtttcgccagatagtggcgttcataaattgttttttatcccatgatgaaatatgctgtgatcggagccggggtttccggattgtccatggccggaatgttgctgaagaaagggcatgaggtagtcgtttatgagagggactcccggcccggcggcctgattaaatgcacggaagtacaggggaacctgtatcatcgtgtgggaggccatgtgttcaattcccggcggcaggaagtgctggactggttttggtcccggtttgacaaggagcgcgattttgtttccgcccggagacgggctgttatttccctggagggcggggctgtggtggattatcccattgagaaccacctcgaccagtttcccgaggccgtccgttcctccatcgtccatgagctgctggaactttacaggaatcctcccgcggagccccgctccctgggtgagttttttctgaaccgtttcggaaaaaccctgaacagcctttattttacgccgtacaataacaaagtgtggaggcaggatatcagccaaattgccatggattggctggaagacaagcttcccatgccgagcgtggcggaaatcctgttgaacaatattgggcacatcaatgaaagcgccatggtgcacagttctttcttttatgcgaaaaacggcggttcccagtttctggcggatacgctggctcgcggcctcaaggtcaggtatcggcaggaagctgtaaatatcctcccgaaggacgggaaatggctcgtacagggagaattgtttgacagagttgtctttacggggaatgtcaggcagcttggggattgttttccctgcatggatgaattgcgcccgtttttcccccggatttcagaattgcgctttcacggaaccacttccgtgctttgccggatttcccccaatgattacagctggatttacatgccctctccatcccaccgttctcaccggatcatttgcacggggaatttttccagaaataataataacggggacatcaccaccgcgactattgaattttccgagcaaatgacggaaggggaaatcaggcgccagctggagcttattcccttttcccctgtgtatctggcccatcactgggaagaatatacctatcccgttcaggatgtttccagccgaaccctcatacgggaactaaaggagtgcctggaaccgaaaggcatttatttattaggccgttttgcggagtgggaatactacaatatggatgcggccatgagggcggcccttgatttggataaaaggctggctgcggagcagatgacacggggataagtcaaattctggacattgtggtgtatttgaacgggggattgtaaatccgcctgtttttaaaaaagtttggatatagttataaaaaaataactataaataacttatcgtgttgaatggttttttggtaattaaaaaaatcctgtttcaatccgtggttccatgcacggagatgattctccgttaaagttttccattgacagcggatttacaactcgttataggtacggacgcagaagatgtgttcccgtttttagggacatggtttccaccggaatctgggagtatggctatccgttattgttctttcgcgacccgcggctatcatttgcggcaatggatgcagatgatgagcctgaggctggcggattcctcagtggagttgtcctgttggaatcttaatcgcctggaaagggaaggaatcagggaggctattccatggtttgacccgaatttacagggtgccgggttttgggtatggaaacccttcatcattctcaaggagctggaacatttggaggaaggggattacctgctttatacggatgcggggcgcccgccggggaggctgttccatcattccttggagccgtttgtccaatggctccgggagaaggggcaggatatgatgccgggcgtgaatatttcctattatacgggaggccttacgcggtggtgcaagcagagcgtttttgatgaattgaagctggatagcgggtcttttgaacaggctcccctgattcagggctccttccttttcttgaaaaaatcggaacaaagcctccgaattctccgtgaatggatggatttgtgccgtcagttcaaattggtgtcttctgccactacggaagaagagagccgttgccgcgataattttgtagctcatacgcacgatcagacgctgctgtctctcgtggcggcgcaacatcatctggactgcctgtattccgggaagggcgtcattcatctggaaggccgccgggcgtttgagcggcatcccggttttgacgacaaagacccggactggtttttggaagagcttggcgcaaagaaagcggagcatcccttaatgcccgtgctttgctgcatgcaacaggcgtttttcctgtatgaaaaagccatgaataaattgatgaagctggcgggcttgagacccctccgcgggttttacggttgatggacggttgtgtgcggaaggggagtttgcctgtttcggcctccgtgacggatctctccggcctgctatggacgaaaataaaaaagcgccggaaaaaccggcgcttggaaaggtagtttcccgtgtggcttttaccaggaagcgtcgaatttggggataggcgttcctttgcctccggggctgttttccggaactttataggttttgcgcagttcgtggtaacgcttcttgagctgttccaccgtagtcttgtaggcaggatcgtcaatgacgtttttcatttgcatgggatcctttttcatgtcaaagagcatccattcgtcgctggtccagatgtaggaaagcgtgtagcggtccgtccggatgccgtcgtggcgcggggcgttgtgttcgccgggattttcgtaaaaacagtagtaaatggcatccctccagttgtcgggagttttgcccgtgaaagcggtgggaagcagggatacgccctggaaggtattcatgttttccggggtgtccgcccctgccgcagaaacgatggtgggagcgtagtcgatattctgcaccatggtgttgttgcggatgcccgcgggaattttgccgggccatctcatgatgaggggcatgcggagggattcttcaaaaatccagcgcttgtcgtacatgccgtgttctcccatgtagaacccctggtctccgcagtagatgaccagcgtgtctttcgcaatcccctctttgtccagatattccataaggcggccgatgctgtcgtccacggacagaaggcatcccagataatcctccatgtaggcatgccacttccattccgcaaacgctttcgggtccttcagttttccggatttcatgccgtccaccagggatttggtgcgcttggcgtaatagtccgtccaggttttcttttcttccggagtcatgcggttcaactcgcccaggtcccagccgtaaccgggggaaacgatgcttttgcgcatctcttccggaacctggtccttaagcactttgaggtcggaataaatcgccatgtgattggcgacggtctgctggtttttcttcaggaattccggacggttggcgtagtcgtcatggaagttggcgggcggcgtcatgccggaggtgtccaccttgcccaggtggcgcagagcagggcaccaggcgcggtggggagccttgtggcccacaacgagcaggaagggcttgttcttgtcccggttttccagccactggatggatttgtccgtgaccacgtccgtggcatagccgggaaatcgcttcgtctggcgtttgccgtccggcttgaggctgataaagtccggattgtagtagctgccctggccagggaagatttcccacgtgtcgaacccggtgggatttgattccaggtgccatttgccgaaaaggcccgtctggtatccggctttctgcagcattttcgggtaggtgggctgggagccgtccagcggtttctggccgttgaagacaaagccgttcatgtgggaatgcctgccggtcaggatacaggcgcgggaggggccgcacagggagttggcgcagtagctgcggtcaaaaaccatgccctggcgtcccagtttgttgaagttgggcagggcgacgggggaatcgtctttgccggtgcccagcgtctggtaggcgtggtcgtccgtaatgataaagaggatgttcggtttcttattttccgcggccctggtttgggctgacaggggaactgccgccagcagggccagagttccggcgacgatggttttcaagggtctcatattgcctggaggatataggatggcgccgccgtgtcaatgtcataggattccttttgccggtattctgcgttatggtattcttgccccatgctttcctctactctggaagacacgctgcgtttgttcggcaaggagcggttccgtcccatgcagagggagctggtggagtgtgcgctggagggccgttcctgcatcggtattttgcctacgggttccggcaagagcctttgctatcagattccggcggtgcttggaaacgggctgacggttgtggtttctccgctgattgccctgatgcgcgaccaggtggcggggctggaaagactgggggtggccgccgccaggtatgattcgaccctggcggaggaagataaggccgccctgatggacagattgacgtccggaagcgtccgccttctgtttgccgcgccggaatctctggaatccccgtggattcagcaggccatggagcttgtccctcccggcttgttcgtggtggatgaggctcattgcctttcggaatgggggcacagtttccgtccggattatctggggctgcccggttttttcaaaaagcacggattccgctgcgtcatggcgttgacggccacggctacggagcgggtgtgccgcgatctggccggcctgtttggcgtgcgcgatgaatgtattttccgggctgctccgtaccgtgcgaatattttccgtcaggtggaaacgttgagggagcaggataagaccgcgcggctggttgaattgttgaaagaggaaggccgtcgtcccgccgtggtgtacacgcggacccgcaaagatgcggaaaacctttcctacgaattggggaaagccggtttttccgtcaagtcctaccatgcgggcatgcctccggaaacgcgggggctggttcaggacgagtttctggcaggcgcggcggacgtgctggtggcgacgattgctttcggcatggggattgacaagccggacgtgcgttccgtagtgcattaccatccccccgccagtctggaggcgtatgttcaggaatccggccgtgcgggccgcgacggtcttccttccttcagcctggtgatgttgtccgcccgcgacagcgtagctgtagtcaaccggctgcatgcggcggagccggaccggcacggcatgaaagggctggtatccctgttgtcccgcaggggggagcacattgtttccctgtatgaggcttcctccgtttatgatttgccgggtgtggcagtggaccggatgctgtttgacctgaaacgttccggttccgtacgggagaaggggacggggttcaagtattacagggtgcgccctctgttccggatggaggaaattctgtgcggccgcggcggggaggaatgcgcccggctgcaatggatggatatgcgccggcagggagaggtggaggatctggctgtggaatggggaatttcatgggaagaagccgccgcctggcttggtgacctggctctttccggggaatggaaagtggagctgcgccaggcagcccttcatctgtattcggaaggatttgacgcggaagaggctgcggaggaatttgagcagtatttttccagatcccggctgaacgggctggaacgctggaaaacctgcgtttctacgctgacgtcttccgcctgcctgaatagaagcctggatgcctatttcggtttccgggacctgtccgggccttgcgggcattgtcctgcgtgctgcgggatgttgcctgcggccatggaagaagaggaacttcccccgttaccggaagagctgcgctccgccgtcatggagctggcggggcagaggaagcccgcgctggcccgcccttcccagttggcgcgctttctgctgggactggcttctcccgcggccatgcgcgcccggttgtggagccatcctctctatggggcgctggcggacaggaaatgggaggatgtgtggattgaggcgcatgccctgtcgggtagttagaggccggtttttccgccttgggcggcttcataggcggcaataatgcgtttgcaggaattttccgcatgcagcagggaacaccaatagcgggatatttcctccgggttgcgttttccggagtcccaggcgcggatttcttccaaaagcgccccggagaggctttccggagaatcgtccgggctgagtgtgcctgaatcatgggaaacgtaccattgcaggcagttcagctggggtgtgaggcgaggccctacgacagaggccccggcgcacagcgcttctgcggaggcaatgtgagaaccttcataacgggaggaacaaagacaaattttagattttgcataaactttgataagtttctgattgggtattattccatttaaatggatgtaattttgatgttgggggggtaattgttggtgccattcgtgcaggaagggtggtattctcccataaatttcaacaatccacggggagggacttttgttcacgaatatttccagtgcttgcatcagaagatttgtgtttttttggaaacaatcgtcccaacgacccacagcaacaattaaattgtgttttggctgtacaggattcagagtatgttcagaagagatcgggttgggaataagagcaagttttttacatatctgtttcccataaagccattgacggtctaggatggaaagtaaggcagcaggagatggaaaggaaataagatttgccattttcaagtgtttccttctcccccagtccaaagctccgaaggtatgatttttgatgatgtggagacaggcaaaaagagggccctttaaatttcctcttttatttttctccctattccaaatttggagtgtaagtgttttccaatagcgccaagggtaaaatagcccggaagtatccatatacactaccagaaagattcccgcgtcatggatggctctggcgatgggaaggtatttgcccattccccaggcgtacaggatcactccgtcaatacccagggacttccaccaggctgcatctttcaggttggcgtattccgtgcggatgaggtcgggatcatctccttcctgggcaggtgtgggcatgatggccctgctttccaccccgattctctgaaaggccttgcagaaagcgcctgaatcgcgggaaaagaaagtatggtctcccttgaaggacaccggagtgcatgtgtaccatttcatgatgttggtggggtggaagatgaatggaaaacgcggagctcgccaagaagggcttccatggaccggagccatgcggcgggggagtatgtggaggacaaaagttgttgcccgtgcgcgcccatggccggccagcgttcttcttgcttcagggcggtgtgcagcgtctccgccagggattccgcggaaggttcctgtgcaatccagccattcctgccgtgggtgatgagctccggcaggccgccgttcggggtaacaatgacgggcgtgccgtggagccatgattccaggacaaccataccgaaggtttcctcccagagggagggcgctacggagaggccgcaggcggcgcggacggctccttgttcctcatggggaatgaacccggtcaggcggatggattcaagatggcgggaagagatataacgcttcagttctccgcgcagggggccgtctcccatcaggtagagaatgcgaccggggggggataggagttcccacgcctgaaccagttgcaggactcctttttcctgcgtcaggcgtccggcgtaaaggacgtctcggcggggcgggtcggcggcaggggcggggttttgccggatgaaatgtggaataaccctgattttatcctccggtattccggtttggatgagaagttcccgctggcgccggctgatggcaatgtaggaggaaaagcggctccaggctcccatgcggcgcgttttatacaggacggcggcggccagggatgagtacgcggcgtttttcctccaacaggcgtgcatgatgccgggaaaatagttgccgtcttggcaggaaaagcagggcgccccgtcccggtaaagtactccgttgaggcagccggagcggtaattgtgcatataatggatgacgggagcgggttgatgcagggccagttcatagacgcagggggacatggccgggaacgtattgtggatgatccatgcgtcatagcggttttcacgcaggcattcgcgcagtttttgctccacgtccctgttgtggagcaaataacccattttcgtcagggcgccgtgggggctatggaacagctcctccgttgaatagacaaagggtgtgacatccgctatggcacccaaagcctccgtaatggcatggaagcagatttcttcccccccaacctcgccgtaacggctgaaaatatgtagaatacgtggacgttgcatggctgcggcggcacagggggttatccctggagttcccttctgagtttcgcgggatccttcaatagctcccgctgaatggcttcctgctgctggcgcagacggtcttcccgtaactgaagggattttttcccggctcccagcccggcattgacaaagggattgttgtccccgtatttggaccacgggccgcggggaatgcggtaaaattccacaaagcgccagtggacaatggctgttcctcccgtaatgcccagatagtcgcgtacggcaggggagatgtcaatgcccgcccctttgttctgggtattgacgggaggcttgtctccaaagacgtagggccagtcttccgtggtgaaggggccgcagtcttcccattgggcaaaacaggaacgcttgttgtagacgatttgcacccatctgcccttgcagacggattgcccctttcccgcatattcgcggcggaaccacgggatgacccgtgacgcctccgccttatgctcccctctggaaacgtcattataagggagcgccacgtaaaaggggttttgccgggggatgaatgttttcgggcggaagtccctcgtgcggcaaacgggatccgggttgtcgaagccgccgaagttttcccgccatgcggaatcccacgagcttttgtggttggctaccggattgcgttccgtgggttcttcccccacccagaagaccgtggcggtaatgttgagacgccagggataggtgccggggctttgcctggacgtcctgggaaggatgcggggagcgggccgctttcctccctctgcagcaacaggcgatttgacgatgacccggggcagggggtcccgttgcgttggggtgacgatgacggggcctttgggccgtccggaactgttcgccagggcgcgggtggcgctccggcctgtctggatgtccgccctggcggtttctgcggaaaccagaaccggcagcgtgagcaggcatgcggacaggagggggctcccgaagagccccttccgtaatgcctgttgacgctgccggtagtttaccatcggtgcagttgggtgacgaagcggtggtccagcttgccgggataatccgtattgaaatgaaggccgcggctttcattgcggcgcatggcgcagtctacgatcagggaggccaccgccaccaggttgcgcaattccagaatgtccggcgtaatgcggtatccccagtagaagtcctttacctcccggtgcagcatccggagccgcgtggctgcgcggtccagccttttattggtccgcacaatggagacgtaatcccacatcaggcggcggatttcatcccaattatgatagatgacggaaagttcgtcaggcagggctgtatctccgtggtgccaggctgggatgtcgtaaggagtgggggaatcctttctcaggggatgcagggagagcatggagttcagcgccctcttggcgaccaccacgcattccagaagggagttggaagccagccggttggcgccgtgaagaccggtgcagccggtttcccctgcggcgtaaaggccgtccaggctggtctggccgttgacgtccgtcagcacgccgccgcactggaaatgcgctgcgggaacaacgggaataggttccctggcgggattgacgccgtagcggttgcatgtctcgtaaatcaggggaaaacgttcctggacgaacccttccggcttgtgggagatatccagataaacgcacatgctgcccgtcctcttcatttccgaatctacggcgcgggcggtgatgtcgcgcggggccagagatttgcggggatcgtatttgtgcatgaattccttcccgtccgcgcctatcagcacgccgccttccccgcgcacggcttcggagatgaggaaggagcgcgcttccgcgccttccgcgcgggtgttgaagaaacaggtgggatggaactgcacgaattccatgttggcgatggtggcccccgcccgccaggccatggctacgccgtcccccgtggcggaatcattattggtagtgtacagatatacgcgcccgcagccgccggtggcgagcagcacgcggtctgaccggaagatttccacttccccggagacgcggtccagcacgtaggctcccagaacgcggtcttccgtgacgaggcccagcttggtggtcgtaatcaggtcaatggcgaaatggtcttccagcagttcaatgttggggtgaagcttggccgcctccagaagtttggaggtaatttccagtccggttgcgtctttggcgtggaggatacgccgtttggtgtggccgccctccctggccagttcataatcctctccctggttgccggggtcaaagttcactccccattccagcagttcccggatagcgtccgggccttcctccacgatagtgcgcacggcctgttcgttgcagaggcccgctccggcgtccagcgtatccgcaacatggtcttcaaaggaatcgttgcggtcccatacggcggcgatgcctccctgtgccttggcggaactgcaatccagaaatttgccttttgtaatgactgcaaccttgccgtgtttcgccgctctcaaggcgaaactcaatccggcaacacctgccccaatgactaaaaagtcgctcgtcttcatcttgaatggtacggaattgtaccatgacgcgggctgccaagtcacgcccaatgatggggcggaagggcatatttgtctggaaaagaagtgtgaaacacgctaattcatgggcatgagacctcaagggaacgaacaggaagcgcgccggaacaagcatgtgcgcagcgcgccgtccaaaattgccgtgaaggcgctgggagaggaggtgctggacgggattctggacaaatcccccaaccctctgctgctgattctggattgcgtgcaggatccccacaacctgggagccatcctgcggacggcggacggtgcgggagtggatgccgtcatcgccccccgggacaaatccgtgggcattacggagacggtgctgcgcgtttctgtcggcgctgcggaaaaggtgccttttattcaggtgaccaatctggcgcgcaccatgaagcagctccagagccgcggcatctggatattcggcacgtcggacaaaggagaccgcggcctgtatgaaacggacttcacgggaccggccgcactggtgatgggggcggaaggggaagggatgagaagattgacggaagagaactgcgatttcctgctgaggattcccatgaagggaagcattccgtgcctgaacgtatctgtggctacgggcgtatgcctgtatgaaatggtgcggcagcgttcctgattccatgactgtttttctccttccctcgtctttatgattcaggaacttgatcttgcttcgggggaacgcgccaggtttatttcagacatccatttcggccatgccaaggcgctgacccgggagccggaagagctggggtttcttctggaggggtgctcccatctggtggtgtgcggggacctcagtgaaacccgtgaaagcccctgccgggaggaaggattggaaaaacgggcccgttttctgcggatgtgccgggatgccggggtgcagcccgttctgctggccggcaaccatgatccggacgagaaagccggactgctgaaattgcagggtggccgcatctgcgctttgcacggccatgcgctgttcagggaggtggctccgtggggatgggaatatttgaaaaacaagcagatttcccgcgaactgatcgctgcgttcccggaggcggaggcagatttgctgcggcggctggagctggcccgtgccatgagtgtgctggtgccgcctgtttacacgcgttccggaacacatcaaaataaactggtgcgttttttagctcattctgcctggccgccggaacggcccgtgcggattcttctggcatggctgacgatgatgtggcgcatggggaaatttgcagaccgttttttcccggaagcggaagtcgtcatttttggacatcttcaccggcgggcggtgagcgggaaaaaggggcggcggctgtacgtcaacctgggcgcctgtttccgccatgccagatgctgggcggcggacgtaacgccggaaagaggagtctccatccgcagttatacgcccggaggatatgatggcccggaggcaattctccgctgattaatgcccacgggaaaaaagtgaggggaacgcgtccgtgtttaggcgataatgtgttagagcaccggatgactagtccatacagtttgtggacgcgttccccatagaatttggccgtgcctgttttccctggtagccggcgggacagtttttcccggagcttttcagggcgcagccccggcagcagcaggggcgtgaggaggaaaaaaacttggagaagaaggactccattctgacgggtgcgccgccggagcactttctttcaccgtttctttccgaattgggactgaccatgaagcaaagttagcgaaaactaacttatgttgcaagaaaaaagtttgtctcacctaatctttttcaagaagaggttgacttggacagagccttggttattgtttttttgttagttaaacctaataagcatcaatcatgatacatgaaaaattttccactccggagttgagcaacagcctggaggattatattgaggccgtccgcaacattgagttggaaaagggatgcgccaccgtaggggagattgcggaatccctgaacgtgaaaaaaccttccgcctcactggccatgaagcagttgaaggaacgcggcctggtggaatacacgcagtattctcccattgtcctgaccagggaaggccgttattacgcggaccgggtcatttcctgccataccatggtgaaggagttcctcattacggtgctgaagatggaggaaaaacgcgccgatgaagtggcctgttgcattgaacatatcatgactctggaggaaatctcccgtttccagcttctgacggatcgttgcagggagagaggagaataaaatactcccgcatgattttccgggggggacggttcatgagggaatggctcatccctctcttttttacttcgaaccccggaccagaggaaggcatcggcgtgtgctgcgcgcactgacgtacactgtggaagcgttgtggaggaacgcggaaaaggccggggtaatcagcccgaacatgcccagcagtatcagagaagagttgaacccgacgataaagcggtagttgcgttctattttttcaaggacggcacagctcagttcccttaaaacaaccagttctgccagagagctggacaacagggaaatatccgccacttcacgggcgatatcggaagaatccttcatggagacggaaacgtctgcacaggaaagagctggggaatcgttgatgccgtctcccaccatgcacactgttttgccggatttcttcaattgctggataaagcgggccttatcttcaggcagaacctgggaacggtattccgtgatgcccaactggcggctgatggcgcgggctgcggattcgctgtcccccgtgagcatgatgatggaggaaatgccctgccgtttcagccgggcgatcgtctctgcggcttccggcctgggcgggtcgctgacgccgatcatgccgatcgctctgcggcctatagcgagaaagatgttggatttgcctctggcgtgattgcgtatggtctgcctttgctcttccgtgagggggatgcgttcatcttcaaagagaaaatggtagctgcccacaagaacctttttcccatgaaggcgggaggaaatgccgtgggccacgatgtattccacctccgcgtgttcttcttcatggtgcaggccctcctccagcgctttgcgcacaacggcccgcgccacgctgtgggggaagtgttcttccaggcatgctgccgttttcaggatatattccctgctgcagtcgctcaaagggatgatctgcgttacctgagggcaggcggaggtcagcgtgcccgtcttgtcaaaaacgatggtgtccgttttggcgaacagctccatgaatttcccgcccttgatcatgatcttgcgcgctgcggcctctttcatggcggagatgacggagatgggggtggcgagcttgatggcgcaggaataatccaccatcagcacggagagagccttggagatattcctggtgaacagaaacagcgcccctgccgtgagcagggtatagggaacgatagaatccgccagcttttccgcccggctttggatgcgcgctttcagttcctccgaatggtcgatcagggcgatgatattgttaatgcgggactggtctcctgcggcgtccacccggatgacgagggaacccgtttccagcgtggttccggcaaagacgacggacccttcccgtttggaagccgcttccgattcccccgtcatggcggcctggttgacttccgcttctccggacagcacggtaccgtccacagggatgacgttccccgcgtccacgcggattttctcccccgggcggatttgctccatgggaacctggcacatgcctccttcttccacccgccagacgcggtctatatttatgctcaggctggccgcaagcgccgcccgggtctttttccgagtgtaattttccagcaggtctgaaatggaaagaaggaacatgatggaattggccgttccgtaagccttcgtgcctatggaaaccccgatggagacggcgtccagaacggctacgttgagccgtccgcttcccaggccggccattccgcgccgtaaataggaactgtaattccagaatactttggccattctgagcgggggcggcagaaacaccttgcaaaacaggaaagaggaagctttccccgctatgcggagaaaaaaggaccgggccagtttcctggcctccgcgcgctcttccggttcgtggctgcggagtgtttccggcctgagcctgtccagcgtgcggaaaatggcctgggggctggttccttcatacaggatgaacacacctccgttgcagggggtggccttgacggagtatacgcctttctgtttcaggagcctgcattcgatgccgtaagcctgatcatgattgaatgcgcagcggccgctgcgtacacggagcctgccgggcgtatgatggataacctggtaatgcatggataaggaaaaagaaaagggggaaacgcccttctccgtgcgtttcccccgttgggggcggtccattccgctggcggagaaggaaacgggcaccccgctgtttggtgatggacaatgagattgctactgttccggcctgctgtttttcgcggcggcctcatggcacaggtcttggacttcttcccggatgtttgccagttgttccatggccttctgctggatgagcatggccttggaaaggccctggacggccaatttcctggcaacgggactttttactactttcgctccgatggcggcggcgatcattcctccgacgaagccccagaggcctttgttgttcatgtaactcatggtaatgttttgattgggttcatccggccttggcggcatgcagccgcttcttttccggaaggattggattatatccaatccagcctgcatttttttagcgtgcccccgtattctggtcaagatgaattagctgaaactaatttttagcagacatgaaaatatttttgcgatatttttaatacgttgaaaacaaataaaatataatgaaccaacataatgttgtactgagcagggcaagggcattgggaagaaaaagtgttgactgaatagttagtttaatctaactttgccgcgttgcatgaacttgacccatacaggacttcaccgtttcttccgccgggtctgccggtacaggaaactggccgggctgctcatccggcgtcccagataccgtctgctctgcggagactgtgggttctgtatgggggcatgcggcagagctgtgaaagagcaagcccgggagaacggaagcggagctctttccctgtaaaaggaaagcgcccctctccacctctggatcaatcatataagtattataccacaaacatccaacgataagactaaccgttttctatgaagaagcataacataatagcaatggcgttgacgagcctcatggcgcttcctgtaatcgctcaagacagcacccctgctgttggtgatattttgcagggcatcaatatgttcactccggaagaaggcgatcctgcctacaaggtgaaggccaatgagaaatacggcacccaatggggtgtggatatggcctacggactttggaatacggaaaaggtttccgatgttaagcgccataacaacctggctcttcttcatgcccagcttaatcagcgccttattgaagacaaggccaacgggggaacctggttgcgtgtggaattttccggttcatgggggctggatcgtgaatccgcacagagcgatacgtttttcactgaagcctatgccacggcttccggcttgcatgctgacgcgatggggcctcatgaaggaatattccctgaagtggcgctgatgcaatactttgcagggaagcgcgcttgcctcatcgcaggtatggtgaatctcaccaactactttgatgctgtcagcattgccaatgactccttctcctctttcaccaatgacgggtttgtgaactccactatcctgcctttggtggacagcaatattggcggtattctgcaagttgaactcaaccgcaataattacatgatggttgccgtttcccgcacgggatgcgattccggatacaatccttttaattccgattattgcgatggttatgccgtggttggcgaatacggccatatctttgccgacggcgctgcgactctccgcatcaatccgttctataccagcacggatgtggacatggacgacgggaccggggaacgccgccgccaaaatgccgggcttgtcgcgagcatcgaatatactccctgcgatcctctgaccatttactctcgcgccggatttgccgccaaacaatacttgagcaactccgctgaattctccgtgggcgccaacattaagctcttcccttcccgtgaagatgacttcctgggcatttcctacggtgtgttcaaggggcagaccccctgtgacggagagcgcgctgagcataaccgcgaacaggtgctggaagtcatgtacagcttccaggtgaatgattatttcaaagttgttcctcacttccagtacatcgcgaatccggcttacagcacttccagcgaaaacattctctggggcgttcaggcagtcttttctttctgatcagctgatcctggacatggccgccttttctcttaaatcaggcatggccggagtttcatgaaaacataatgacattaaatcttccttgtctgtctccatgcagtgagcggaatcctgcgtgagaaagatatagaaggggtctgcatgacctggcggcaacgccgcattctcgatcaggtagaggatgcggcgttgcttatttgattacggagccatttaccctcctttattgatgcctgctggcggagcttggaccggcaatgtatgccgggtcatggaatggccttcagcctttccttatctaccgtcaaatactgactgttgaaggtaggaggcttccccaaggctattccgtagaatttttatcccggggaaaaataaaagccgcctgaaaatgggctttcccacccctgtctccgttcccggaaaaaacggaaaagaaggctttttgccacgccggaagatggatgggagccgcaacgtttccgggggccgaagcgtttaaaaccatattgacttaaacgggaattatcttaaactgacagaatgagtaaggttcaatgggaaatttcaaatgatgaagtgaccgaccgtgatactgctctgcgccgcttgcaggaaggaacgaccggccacgtggtgtgcgcccgcgacggcgcgtgcctccagtcttataaggaagcggatggcgtgtaccattgcgaaattgtattcaagacggattcctgctgcccgccggtattcgccgccccggaaggggtgacgggaaaggagctggaaatgctttacgatcgttttgccaatggggacgatttttcctttgtggaaaaggaatgggaacctctgatggccgtggaataccgccatcgccacaatgtgatgtggttcatcttcctgttcattgcgctggtaattgcggccatggcggcatatcagcacggttggattgagtgacagggtagaggctggctgcggcaggcgccgtagcagaagaacctgcaaaccgcagaaaatggtttgcaggttctgaatgggataaccggggccgggatttaatcctgtttttcgtggtcgtgatggtggccgccgcagcaatttccgccgccaccgcaacagccgtcgctgtcgttgccgcaacatccgcagttgccgcagcacttgccgcgcttgctgaaaattttgtataacgcgtaggctagggccaggaaaagaagggtggcgatgatatatgttcccatattgttcagtagagttaaggggttggtttagaagttatttggaggctgtataaggtttctttgccaccaggtaaacgagccccagcaggagcaatagggcaatgccctgcccgatgccgaaggaagcttccgcataaagccatgctcccagctggtaaatcaggaaggccaggcagtacgccagggcgcacatgtagccgatggcgaagaaggtccatttggcgctgttcatttcccttctgatagcgcccatggccgcgaagcagggggcgcagagaagattgaaaatcatgaaggagaaagcgctcaggaaggtgaaggctcccgcttggaccaggcggtccccggtttccctgatttcctcatcttcatcttcctcttcttccgcttcagcagcggattctccggaaccttcctccagggatgcctggagctcccggccggcgggggccatttcctgcgtttcgggggagtcctccgttttttccgcttcatcttccccggaactgccgtccgcatacaggacgccgaaggtgcctaccacgttttccttggcaatcaatccggtaatggtagccatggtgggtttccattcaccccagcccagaggctggaagacaggcgcggccacattgccgatggaggccagcatgctgtcattctgctctacggaatccaccttccagttgtagctggagaggaaccagatcagggcgctggacacaaagatgacggtcccggctttttgcacgaaagccttgcagcggtcccatgcatgaatgatgacgttcttccaggccgggatgtggtaaatgggaagttccatgacgaagggagtgggatccccggcgaacatggcagtctttttcagaataaggccggaaaggatgatggcgcccaccccgatgaaataggcccccggagccacccaggaattttccgggaagaaggctccggcaatcagggcaatgatgggagttttggccccgcaggggatgaacgtggtggtcatgatagtcatgcgcctgtccttttcgttctcaatggtgcgggtcgccatgactccaggaacgccgcaccccatggaaacgagcatgggaataaaggatttcccggaaaggccgaatttgcggaaaatgcggtccatgatgaacgctacgcgggccatgtagccgcaatcctccaatatgcccaggcacaggaacagaaccgccatttgcgggaggaatcccagaacggctcctacgccggcaatcacgccgtcctggatcaggctttccagccatggggcgcagccggcgttttccagcaggtttcctacccattccggaacccattccccgaagaaagtatcattggcccagtccgtgccccatgcgcctatcgtctgaatggagatgtaatatacagcccacatgacgacggcaaaaatggggaggcccagccagcggttggtgatgatgcgatcaatcctgtcgctgcccgtcaggctgccggggctggctttaacgacggcgtcgttgatgatgcgggaaatggaattatagcgttcattggtgataatggattcactgtcgtcatccatttcccgttccatggtttcaataatcccgttgatgcgggattgttcctcgggattgagcgcgagctggtccgcgactttctggtctctttcgaaaactttaacggcaaaccattttttctgctgatccaggcattttccggtgatgatttccccaatttctccgatggctttttccagatggtccggaaagtggacggcctgcggggtccgggcgtcgtccgacgcagtcgtcgttactacggcgtctatcagttcacggatgccggtccccttgagagcgctgatttccagcacctggcaaccgaggttgcgtgcaagtttttccgtgtcgatcctgtcgccgcgcttccggacaatgtccatcatgttcagcgctataatgacgggaacgcccagttcgcaaagctgggtggtgaggtaaagattgcgttccaggttgctgccgtcaaccaggttcaggatgagggagggatggtccgtgaccaggtaattccggctgacgacttcctccagggtatagggggaaagggaataaatgcccggaaggtcttcaatgatgatatttttatggcctttcaggcggccttcctttttttccacggtgacgccgggccagttcccgacgtattggttggcgcctgtcagggcgttaaagagcgtggttttcccgcagttggggttgcccgccagggcgatggtaatgttgctcatgaatggtttccttgtcttgatatatgggtgcccgtcttgctgtaaagtcaggaaacgtgcggtaatagaggcggaatcaatggatatggatgttctccgcttccgatttgcgaatggagagttcgtacccgcggacagtaacttcaatgggatctcccagaggggcgactttgcggatgaatatctgcgttcccttggtaacccccatgtccatgatgcgtcttctgaccgggccttcccccgccagtttgccgacggtgacggtttccccgatgagggcatctctcaatgtacgatgtttggtcatagaataatggttggttgttggatggaataactcaggcaacgaatattttgctggcaagcgccttgctgagcgcaatcctggagcctttgacgttgataatgaaattaccgccgttttcggaaacgatggagaccgtgctcccggcaacgaagcccaggctttccagaaaacgccgggtttcatccttgccatggattttgttgacttggcgaatatcgccgatgttgagcatggagagtggcatggtgcgtgtatgaatcaaatccggaaagaagttagttttatcaaactgataagtcaatgatattattaggatatattttcaatcaatgtaaaatgcgtttaatataaattgtttgcgtattagtttaatctaagtatggccagcggggaagaggcggggaatggaagtttcccggcagtgcctgccgtaggaactggaagggaaatgcaaaaaagccgcgccaatgaatgttcattggcgcggctggaaaaagagcttttcttcagattcaggaggcagggcaaacttcgccctggacgggtttgccgttgtattctccggtaagcgttttcaggaaagccaccagcagtctcacttccttcttgtccagtttatcgtaaccgagctggtaatggtacattttcgtaatggcttcctccagcgtctgtgcggaggcgtcatgcatatacggccaggtgagttccacgttgcggagggtcggaacgcggaagcggtgcctgtccgattcctttttggagaaattcatcaggccgttatcgtcattggtcttggcgcgtccggcaaagaaatcgcctttgaggtcggcgtattcaaaggactggcctcccatggcgggaccggtgtggcaggtctggcaaccaagcttcaggaaaagcttgtaaccttttttggcgttctcgctgatggcgttttcatcccctttcaggtagcggtcaaacgggctgttcggcgtgataagagttttttcatattccgcgatggcattcgtgatggtctctccggtgaatccctgggggtaaacctttttgaattctgcggcaaaagcggtgtcttggtccagtttggcagcgatcttcttccagtcatccggatgttcgtaccccatttccaccggattcaggggtggtccgccggcctgttcctggaggttggctgcgcgtccgtcccaaaattgcttggcatggaaagcggcattgaaaacggtgggggcattgatgccgcctttctggctgcggactccagtggaagtgggcaggttgtccgtcccggctttttccagggaatgacaggaagcgcaggagacggtattgtccgtggaaaggcgcacgtcatgaaaaagcttgtagcccagggcaactttggccggatccgtggggagggcgtccggaatgggggcaagaggggaaagggcgtattcctctcctaccatatcgccgaaaattttcaggcgctcatccttgatccactggagcatggcgtttttctcccggagagtgagcgtgctgccccagtgcaccatggtgtaggaagtggggggcatggaattgatttgaagcacatgttccagcttggaaagggtaacggcagtgggaggttcttccatattgtagctgcgctgcccgtccctgatatggcgcgccagcaggcctccggaaagagtattgaccagttcggaaatgtgagtgccgggcttgtggcagtccgcacatttggaattcatggtctgtgcggtaatttccgccgcctgggcggacgtcagtggcttgacattctggttcggcaggaacaggggggcgacagccgccgtcacgatgaccgtgccgcccagaatggctcctgccttgatgaaggaacatgttttgctcatgagattttcaatgacgtggaattgcccggatggtaaaaggggagggataaaaaatcaagatttattctaaagttcgccagcctttctcaggtcttcgttaatggcttccagaacatccgcttccggggtgaaattggcggcgtggtaggagctgcggaccaacggcccggatgccacgtgcctgaagcctttggagcgcgcaacttcctcataccgggcgaaatcatccggatggacgtatttgaccaccggaagatggttgcgggaggggcgcaggtattgccccaacgtcaggaccgtgacgccgtgctccagcaaatcgtccatggagcggaaaagctcttcttccgtttcccccaggcccagcatgatgccgctcttggtagacactttgccgtccacgcactccagagccatccggagaacgcgcagggaccgccggtactgggcgcggaagcggacaatgggcgtgaggcgttccaccgtctccagattgtgtccgaaaatatgcggacgggccgccatcagcgtctggatggaggagggcttctcattcaagtccgaggcaagcacttcaatgatcgtggaagggctggcttttctgacggccctaattacctgggcgaaatgcgcggcggcgccgtccggcaaatcatcccgggtgaccatggtaattacggcgtggcgcagcttcatgtgcacgacggcttccgccacgtgctgcgattcttcaggatccagcgggccgggcttggccgtgcgggtggcgcagaatccgcaggcgcgcgtgcaccgttctccggcaatcatgaacgtggccgtaccctggttccaacattcataacggttggggcagtgtgcttcttcacagacggtgaagaggtttttgccttccacaagctgcttgacgtcccagaattcccggccgttgggcagacgaaccttgatccacgacggtttgcgttccgttccttccgcagtctcattgtcgttccggcgttccatagtcccgctagcttgccgtgactctgctgctttggcaaatgcaaagtgttttattccggacttcattccccgttttcatccggaggggaagaaagacgcgcagacaattttttccgttcttttgccgccagacgcgccgcacggaaaaactcctggagatgaagcaggcactcgtctcccagtacgccgggacgcacctcgcacttatggttcaggggcggattggaatccagcagattgatccagccccccgcagccccggtttttgcatccgggcagccgaaaacgacgcggtccggacggcagtggacgatagctcctgcgcacatggggcacggctccttggtgacatacagggtgcagccttccagccgccagtcgcccaaagcctcctgggccgccgtcagggcaatcatctccgcatgggccgtagcatccttgagcgtctccacctggttccagccccggccgatcacgcggccatccttcaccacaatggctccaacaggcacttcccctttcacgagggcctttctggattctttcatggcttggcgcatgaaccattcgtccgaaccgggcatttccatcattacggaggttatcatggaccgggcggcgcggttctggcaagctctttctggaagattcttattgtgttttatacggtaagtgcgccatgccgcggaaaggggtggggatgaatgcgtttttacgttgattccggagaatgggtggcataagtatggactatgagcttttcagaaccctgtgccttggccgttgatttcggcggcacgagcatcaaaatgggcgtaacggcgggggagcgtattctggcgacggccgaccgcatccctactgccatgttcgaaagcccgcaggcaatcattgatgccatgattgcgtccgcccgcaccctgcgcggacaattcccctccgcctgtgtgatgggcatgggaatgccgggatggtgtgattaccagcggggagtgctttaccagcttaccaatgtgagggtctgggatagggaaattccggtgaaagagatgatggagcaggccctgggcctccccgtcgtgctggataatgacgccaactgcatggcttatgcggaatggaagatgggcgccgggcgcggcatgtccagcctggtgtgcctgacgatgggaacggggataggcgggggaatcgtggtgcatgaccgcatgctgcggggaaggcggctttccgctgcggaactgggccagaccagcattcattaccaggggaaaacgggaccgttcggcagccggggagccattgaggaatacatcggcaacaacgaactggcggcggaggcggttaaacggtatgccggggcgggaatcatcaagacggtggatgaatgcacgcccaggcatctggacgaggctgcccggtccggatgtcctatagcccttcaattatgggaagatacggcggaaatgctgggctgcctgatcatgaacctgatgtatacgctggtgccggacgccttcatcatcgggggcggtgtggccaaggcaggggatttgttgatgaagccactgctggagaacctcaggaaacagttgtttcctctcctgatggaggatttgaaaattctgcctgccagatttggagcggaggcggggttgctgggagcgggagccatggcgatggatgaattcatggggatggggattttggaacggtttaagaatcagaaatcaacgcagactttttgttagtttgggctaatatagggcttgccatgccggagaggcaggtgtacaagcggaacaggtcatgagcacggaacattcccacgaacattttccggaaggtgcttcctgttgttccggaagctgcggttctggaagctgttgctgctccggagacgccatcgggcctgttcccgccgtgctgggcattgccctgttcatcagtgcgctggcggcgggcggcgattccctggccggtatggccgcctacgtgggctcctacctgctgataggctgggatgtactgaaggccgcctttctggggatgatgcgcggccgcgccatcaatgaaaattttctgatgagtattgcttccctgggggcgatgttcctgggggattattccgaggcggtgggggtgatgctgttctaccgcgtgggagagtaccttcaggaacgtgcggtgggcagctcccgtcggtccgtaagcgaactgatgagtctgaggcctgaggccgtccatgtgaaaaaagtcggagccgtagatgacgttcctccttccgaggttctgcccggctccctgattgaagtgcgccccggcgaacgcgttccgttggacggtgtggtaacgggaggtttctccgtgctggatacctccgccatgaccggggaatccctgccggtggaagccggatccggaagccccgtgctggcggggtacatcaacgggcagggtgtgctggaagtgcgtacggagcgggactggcggcattccgccctggcgcgggtccaggaactggtggaagccgcatcaggccgcaaatcccctctggaggggaggctgtcctcattttcccgcatttatacgccgctggtgatttccatagccgctctggtatttttgctttatccccttgtgacgggcggaagctgggcggacggtctgttccgcgccctggtcctgctggtgatttcctgcccctgcgcgctggtactgtccatcccgctgggcttttttgccggaatagggagagcggcgcggcaggggattttgctgaaagggagcaactatctggatgccctacggaaggtgaagacggtggtgtttgacaaaaccggaaccttgacggaaggcgttttttccgtggatgaagtgcttccccgtgacggcgtttccccggaggaactgctgtactgggcggcccatgcggaactctctgcctcccatccgctggggcgttccattgtgaaggcatatgaagggactctgtttccggaccgcgtggcggaactggtagaggtgacgggcggcggcgtttcagcccgcgtggaagggagaccggttctggtggggaaaaagtcttttcttcaagaggccggcgtaaggacggaggagggagaagaccatggcgtgaccgtttatgtggcgttggacggcatacttctgggatgcctccgcctgtctgaccgcgtcaagccgggagcggagcgtgcggtgcggaaattgagggaactgggcgtttccaacctggtcatgctgacgggggattcttcttccgccggaacggaagtggggcttaagctggggatggacggggtattctgcgggctgatgcctgccggcaagctggagcatgtgcgccggctgaaacctgaaacggggctgcttgcctttgtgggggacggtatgaatgacgccccttccctcgctgctgccgacatcggcattgccatgggcggtgtagggtccgatacggctcttcaggcggctgatgtagtggtgatgaagggagatcctttggccgttccgctggggatgatgctttcccaagccacagagcgcatcattgtgcagaacatcgttcttattttgggcgtcaaaattctggtcatggtgctgggtattctggggctggcggggatgtgggccgccgtgatggcggatgtgggcgtctgcctgcttgcggtgggcaactccatgcgtattttccgggtgaagctggacatgtgacgaaagggaactctcttcctccccctgtttatgggaggatgcccccatcccgatatccggatgctgccgcggaatcttggaacagcggaagatatcctgataaaaaaacctccgtgccggcgggcggaacggaggacgggggaaaaacaggccgggcagaaaatcttaccgcagccccgtcagcagaagttccgcgttattctgtgtcttggagatattttgcaggagagcctgaaggccttcccatcccggtttcatggcgagctggcggcgcaattgcatgattttgacgaattcctgttcgttatacagcctgtcgtcattgcgggtgccgctctgggaaagggaaatggccggataaatgcgccgttcggaaagttcccggtccaggcggatttccagattgcccgttcccttgaattcttcaaaaatcacttcgtccattcttgattccgtgtctaccaggcatgtggcgatgatggtcaggctgcctccttcttccacattgcgcgccgcggaaaagaatttgcgcggtttttccaatgcattggaccccaggccgccggacatgatgcgtcctcccgtctggttggcattgtagccgcgggccagcctggtgagggaatccagcaggatgacgacgtctctgcccatttccaccaggcgtttggcccgttcgataaccagatcggaaacctgggcatggcgccgggaaggttcgtcaaaagtggaggcgaataccggagcatccacggtttcttcaaaatccgttacttcctccggacgttcgtccagcaacagcacaatcagttccacttccggataattggccctgatggaacgggcgattgttttcagaagaacggtttttcctccgcgcgggggggccacaatcaggccgcgctgccctttgccgaagggcgtcatgaggtccagtacgcgcatggcggcggaattgacccccttgttttccagaaggaggcgttccttggggaagaggggggtgaggcgttcaaaatcgctgcgcgcccggtagtcttccgcagggatgtcctccacgctgatgacggaggctgcagaaaggtacttgtcatgaggccgcaatttgcgcagcctgaccttgatctgctggcctacgcggagatgcaggggtttgatgagattgccgcccagataaatatcatccggagaggtgcggaaacttttcaccggatccctcagcatggcgtaattatccttggcttgttccatgaccccggaaactacgacttcatggccctttgccagaagctgtttccccaattcaaaaaccagctgggacttggtgagggaggccgcgttccggatgggcagcccttccgccatttcctgaagatcgttcagggggcgtttccgcagttcattgatgtcaatctgctccagaacaggggctgcttcctcctcctcccggactgcgtttccactattttcctccggagcggcagccggctgttccccggcggtttcttccggcgcgggcaggggcttggggagggtttcctgcggaatatctccggcgggggaaggggtgttgtcgagttcttcagtcatgaaaaaatgttggtaaagtctttgggtttgctggcggagcaggtccggggggccttcattccagatgacgaagtcggccgcagccactttttccatgataggccgctgggccgccagaatggcttcaatcatatcctcccggaatccattcctgatagccaggcgggttttctgcgttcccctggaaacagccaccacgcacacggcatcttggcaatagcgcgccgaagtttcaaaaaacaggggcacgtcaatgacaaacccgtccacctccgtattctgacgcgccgccagcatttgcgcaagacattcttgatgcagcagggggtgaatgatcccttccagcgttctgcggctttccggattccggaaaacaagctcccgcagaaaatgcctgtcagcctttccggaggagtctacgctggctgggccgaagacgctggagaggggggctttcagcgtaccgccatccagcaatctgcccgcctccgcatcacagtcaaacaggcgcaggcgcgcgcctcccgcctccatcagcagacggatgaatgtagatttcccggtggctattcctccggtaacaatcagggttttcatggggggaagggaaagtaaggcgcttctgggatataaagagcgggtgaaagggttaccctttcacccgctccaatatggacgttatgcacgcagcctacatgggaggcagcaggccttcggaggcgggaagggcgctttccggagcggtcgcagtgggaagggcattgccgcgtacgggctggcccgtggcgtcaatgatctgtcccgttacgaagatcatcagattcttcttgatgtggttgtcggagttgctgcggaagaagcggccgatgagaggcaggtcaccgaagatcggcactttgtcttccaccgtctgcacgttttccgtgatcaaaccaccgattgccacggtatggccgtcgtagatgaacagggacgtttcaacggacctcttggagaagatcggctgctcgatgcggttttccgtcagcgtcagggacatcggcttgccgtcggaaccaacgccggtggactggatcgggctgccgtagttcacgaagccttcaaattccacgatgctgggcttgaagttcaggtcgatgatgtacttgttgtctccaatggtaggcaccacttccagagttacgccgacgggcttcatttcaaacacgccgggagtggcgggagtgacagggaagctggatatctggggttggatctgattgcccaacagaccgttcagagtgttaccgttgttcccataaccgtaaccattgctatagccgctgcctacggagttggggagttccggcggttcgtattcggtgggataccagaattcgcggatgatttcaatcttggcggtttcaccggacttggcggtcacgctgggggcagtgagaacgtcagacccttttttctgggacaggccgcgcatcagcatctggaaggagccttcgtcataaatgcccgtcagggacatgatgccgggagcggcgtttttctgggaggcttcagagcggttggtgctgttcagcagattgtccacggagttcttggtgatggcgtagtcacccgtgcggttgccgccggtaacgaggccgttgatggtgtcgctgccgctgtttacaggccagccggtcacgccgccgggagactgggtaaagctgtcggaagtggaaccggtgccgtagttcgtgccgccgcccaggaaggtgctgcggtcattgcttacggagaacggggtgacaatccagtcaaagccgagttcttccgtgttttcctgggttacttccacgaacttggtcatgatgcgcacctgctgggattcgccgcgggtgttttcaatgagctgttcgatcaggtccaggttgccggaagtgttgcggacgaccaaggaggaattgccgttgacaaggaatgccgtggcgccttccgggaagctgatgccgctcttttgcagcaggctgcggatggagggcatgggtttaaggccggaggagctttcgccaccgccgccaaaggggtcgtcactgacttcgccgccgccgtcgccgacggtggtgcggagagcggactggaagcccgggggcacggagaaggtgcgctggtacagatccacgtcattaccgccggcaggaaggatggtcactgcatagtcttccaccttctggcgcaggccggcattgctgcagatgaaacggagcacttccagcatgggaacattagtcagcttcaactggccgattttgcgggtgcggatgctttcctgcggggctgctgccggagcagcttccgtgacttccgcagtttcttcgccaaagccgtcttcatcagttgcgggaacggcgggggcgacggcagcgggctgggaatcattgatgacaaagttgatgccgcgttcaccgttcgggcctaccgtgcggtccagttcaatggactttttgcgcagatagtcaatggcgtcttccacggtggtgtcttcaaaagagacggaggggatgatgatgctcttgagcttcatcagattggccgtggcgccgttgatgtccgtgatcggtgcgttgtcagtgccgtcggctccggtcgggacttccatcgggatggggcgttcccacatcttgtccacttccgccagcatggtgctgcgggtttcgtcgtaagcggctgcatagtaagccattctgcggcggttgaccgtttcctgtccgcggcgggccgccacgttgtacgggtcgatggagagaaccttgttgaattcggcgatggctttgtcgtagtcgccgaggtcatagtaaccataggccatgtgaaggagggtgttcaccttttccacgtttttcacgtgttcgggggtgagcgccggattcgtgcgaatcgggtccttcatgtattcgagcgtctgcttggcaagcttggcgctccggggattgagcttgatggcatcctgcagaagcttgtcggcttcgtcatagcgccccactttgatgtattcctgagcaacggcgatgctggcgtcgccaatatggttggcgatagcttccttgcgctggtcgttgatcggcgcggaaggcagcatgttgtaagcggcgttgtatttgtccagggcttccttgtacttgccttcgcggtacaggttgcggccttccgcaaggagctgcatggcttcctgggtttgcgcttcgcggcgggccatggctgtgcgcgctgcactggactggtattggtaactgcccggtccggcgtaggacgatcccaaggcactggaggttccgacggcgccgccatcaccagcctgcgcaaacgggcaggaggcagcaatggccatcagcgcgatcagggaacgcttcggttgataaagtggtgcgtggtccatagttaggttcttctttttacatgtttttcggatttgtgaagcttttttttcagaaaagtttaaatccggctctattttttcttgctcagtgttgtttgttctccagtggttttgttggcaatggttacggtctgtgtagcattatcaacggttttcagcgtgtagatctgtttggcgtctcccggaatccggaagtcggaaccttcctctacttcaaagctggtatcccgttcggggccggcggtgatagtaaggtttactttcttatcaatgattggaatgacgtattttgttccgcgcctgatggtgtaggtttgtccgttcttggtcggcttcaagtccttgacgacggcttcctcgtccgtttccaccatgtccaggctgggattcttgaattcctttttgacaacgctgacaagttcgaatctgggctcgtcttttgtattcttacgggcgccgaacttgccgttggtctggacgatgtttttccaaatttcctgtttggcgcggttcatacccttaaaggtaaagtcattgccatccgcctgggtgaaagccagatagaagccgaactgcttgatttcgtcgacaaaaagcttgctgacgaggggaggatggctgttggggtcgttgggatgtgttttggccgcatattcttcctgcaccgtaaatccatcgttgtccgggtcccgggtcaggacgtccgagtaaacgaattcattttccagtccgttgtccaggaaccatttgttcggaatattgccgtggataggcggaccggagatgatgtcaaagggttccattcccccctccttaatccagagattgggggcgacgaagcccacatacttctgtgtttcctgggcaatcggcttgagttcgtgggaggcggaaagttcctggcctacttctgcggctttcttgatgccgggaggcggttcgatggctttttcagaaacctgcgtggtgaatttgtatttgtcattcagtcccagaaaggtcagcgtaccataggcggccactcccaggcccaggacgattccggatgccaacaggattttgtcgtaattttgtttttcagacatgttgaaagtatttgctgcggttggtgttgccttggttaatcttcagacggttcctgagctttgggctggttgaagtggaccagattcagggagacctggacaaagacctgctccttgcccatgtaaggcttgatgacttgctggatggccggggctgcaggtgcggtcgcctcatccgccggagtcagggaagccgcacccgtggcgggttgggcagcggcaggcttggcggctgccggattggcgatgggagggggcatcatccgttcgttgcggatacggatggagttgaccgtgaacagataatcctgcatgccggttatggcgttcatggctttcaatacactttcccggtcgccctggaaggctatttccagaggcatgggagtccatggagcctggtcggcttcgtccgattcttccggattgttcgccggggtttcaatggggagctgggggcggtacaccttgatgaatttggacaggccgcattccgccagtttgttgaccaggctgttgatggctttcaattcaaaacccagcgtggaggccgcctgaacagagggagcctgggtgctgtaaacctggaagccgagccaggaggatgtgtccgttatgagaatgttctttttcttgcaggaggagatcagggaatccctgaatgttttcagttcattctggaatgccgtgggcgtggtggggaccagcgcggaggaggcaaggaagggcttgtaggccgtttccaggctgcccacggccttggcatagcggttcagttctttttccagctcttcgttggatgagcggctcggagtgatttccgcagcattggcggacttgatttccttggcggcgatgctgatttttttgtccagttcactgcgtttggaattgacgatgtaccctgtcgcggataaccccaggaataagagaagccccacgcccgcgaccatggcggcgggcttgttgtctgtaatccaattgctcataaaatatgtcttgttcgggttgggtaatcttatttgttaaagttcacgggaatgggcgtttttaacggaagcaccagcttgaagggtacaaaggcccctgccgccgcgtccaccttggcgtccttggctcccagttccatgatctggcgggcttccagtttgacgtctccgggcttgaaagtgaacagggattccttgttcccgtctatttttgcctggaggtcctggatgattctctggccgcccaggctgcgccggacgaatccggtcaggcggatggcgttgacgctgtaaacgcccgcttcatcctcgctggatgcgttggcggaggcctccgtcctgatgtcatccaccaaggatgtatttttgtccgatgtgaaggaatccttgatgacggagtatcccgtgatttgggtggtatcctccggattgaagtgggccagcggttcaaaatccgtaaaccagtagggataatccttgtgttccgactgttccagcaggtgcctgatgatgtccgcgtagccgtagcgctgaagcgtgagctgctggtaggaagccagggtggagtccagttttttcagctcctgttctttctggcgcagggcggattgtgccgatttgatggaagtaacggtgggctggacgccggcgaggatttcctccgcctttttctctcccatatatcctgtgacggcataagctgcggcaccaagaacggcaatggctgccccgacgatgatggcgggcatttttttctggttggcccgctttttggcaactgcggtgggttccaggtcaatattgagagaggccctgccgatggagtgaatggcggtgccgatcaatccgcccaggatgaaggcttcgcgggagatggtgttcacgtccacgccggaacccacgcctacgttgtgcatggggttgaagaaggagatcggaatgcccagtttatcttccaggaattccttggtatagggcagggaagctccgccgccgcacaggtatgccttgacgggagcgcttccgctcatctgggcgcggtaatggttggtggtccgctggatttctgaggcgagcctggtcatggccgtacggatgacggtagccagattggccgtggcgggatccagtccttccgtttgcccgttgctcatggaaacgagcccgctggtggttttcaagcgttccgcttccatgaaggaaatattgaattcacgggcgatagcggaggttacgaagattccccccgcggaaatgctgcgggtgaagaaacgtccctgttcgctgtaaatcaaatccgtggatttggcaccgatgtcgatgagcatgaccggttctttctcatccggataactgtccacatacgcattgtacagagaggtaagcgcgcagtccactttgccggtggaaaggccgtgggagacgatttcatcattcagggagtccaggtcttccgccttgatggcaaccaggatggcttcccgttccagacctttggcgggaagcagatggtagtcccacacgacttcgtccagcgggaaagggacgtgctgctgggcttcaaagcggatgagctgttccacatcggtatcgtccagagccggaagcttgacgaagcggatgaaaacggattgtccggaaacggaatagttgacgacgcttcctttgacgttgagttcctggacgaggtcggcgatggcttcccctattttcgtcaggcgcaagccttctgctgacgggtccagcactacgaggcgcgtagcatagcggtccaggataagggcgtctttggaagtcttggaaaagacgcccattgaaactctctgggaacctacgtttaatgcgacgattggtcgtgaattagccatgggtgatttctgttaaataagatgaaatgatagcattaatggaacgttattcgccgtccgccggggggatcacaggagtaccgaacggggcggggacggaaccggaagccgcctgctggctgttgggcctcataatttccggataacggtcgtaccagaacacggagaaaggcgtttcatccttgttcagcagggggtaataagaggtctccacgatactgggggactggatggtccaccatttttccatcttgccgcgttcggaggaataagtggcgacaatcttgccgttgtattccaccactacgccctggtacttcacccattttcctcttcctccttccacaccggtaatgcgcttgacggaggacggggagagatacacggaagcgtacgtgttttctcccaccggaacattgacgtatttgacctccttatacagtttcaggtactggcgggcgcggtccggattaactaccgcgatgtaaaatttgaacgtcagggcatcaatatagccggatttgggggtgggagcggcttccaccttgaagggaatttcaaaatccgcccatttcttcggtttcggcagcggccggggatcgtcctgcgtcaggacgttgggggactggcgcatatacagggacagcttttccagggagacccgcacctgcattctgggattgctggtggtctgcgccgatgccgcagggacgaaaagcaccgcagccagcatggccgtgatagtgttaaggatggatttcatagcacaattcgattccctgattagttacaccaaaaaccgaactgtggctagcaaaaatctcttgtttctttccatgtagcgagtgtgggcatgacacggctccgtccggcggttctacccgggcggtcaagaaaaaaacatgcggcatggctgcgggcttgacctggcagaggtgtttccacatgctcggcccatggcgattgatactgatctgctgaaaaagttttcagaggcccacggtatttcggggcatgaggatgaagtgcgaagcctggtggctcaggaacttgaaggatatggagaattttcttccgatggttccggcagcctgttttgcaccggcggcggggccggcccccgcgtgatgctggccgcccacatggatgaaataggtttcctggtgcagaatatagcgtcgaacggtttccttcagttggtggggataggcggctggtggccacataccctgttaagccagcgtgtcctggtaaaaacccgctcgggccgcggcatccggggtgtgattggttccaagcctccccattttctgccggaaggccagcgcaacagcgtcatgagcatggaagccctgtttgtggacgtgggcgctgaaagcgcggaacaggtgaagaatgaattcggtattcacctgggggatcccgtggtgccggacgtgaaattctccccgttggaaaatccgttccgggtcatggggaaagcctttgacaaccgcgccggtctttctgtgatgatagaggcattcaagaaattatgccgggaagggcatcccaacaccctgattgccgccgcgacggttcaggaggaggtaggcacgcggggcgccaggacggccggcgtcgccatgcaaccggattgcgtgattgttctggaagggccgccggcagacgacacccccgggtttgccgtgacggattcccaaggggccttgggtggaggcgtgcaaatcaggctgtttgaccccacggccatcaccaatccccggctggccgccctggccgaaaaaacggctttggatgcgggcatcccattccagttgacggtgcgccgttccggcggaacggacgcggcagccctgcatctctccggaaagggagttcccactattgtgctgggaattcccacccggtacattcatgcccataacggcgtgctggatctgcgggactaccgcgccgcggtggaattgacggtggctctggcccgttccctggaccaggaggccgtggaagcccttacccattacctgccctgaaagaaacgctcatgaatccgaccgtttacgtacatgatctggaccctgtcatctggcagataacggactcaattgccctgcgctggtatggcctggcctatttaatgggcttcatcggcgggtattatctgctttcctggctttcccgccggaagctgtatcctgtccctcaggacagaatggcggattttgttacttatgtggctatttttggtgttctgatcggtggaaggctgggatatgtgctcttttaccagattcccaatcacggctggtcccagtttctggcggatccgctcatggtactgagggtgtgggaagggggcatggccagccacgggggaatgattggagtggggctgtacacattttattatgcgtggaagcaccgcgtcaagtgggtggcgcttctggacggcctggccattgtagctcccgttgggctgtttttcgggcgcatggccaattttatcaacggggaactgtatgggcgcattgtcccgcccggctcttcccagggaatgatttttccggcggagctttcccaggatccggacttgttcgtgcgggtggcctcccgtatttatgaaacgcccggattgctggacaaactgtccctttccggcatagctgtgccggaacgaatgactgccgcctgggtgaccgaccgggtgagggatacacccgccatcagggaaatcgtggggcagatgatgcaggatcatgcacgctacccctcccagctgtatgaagcgtttgcggaaggtgtgcttctctttgccgtgctgtggtttgtacgggtaaggtttcctcgtgcgtggaacggtttgttctgcggtatttttgccgttctttatgctgcgggcagaattatttgcgaagagtaccgggagccggattcccccttctccatgggattgacccgcgggcagttcctctccgttttcctcgtgctggtgggcgccgctttttttgtatatgccttcaagaccaggcagacggttcaggaatgcgctttctatgaacctgaaaagaaagacgggaaagaatcgtccggaaaggccgtttaaaacgggtccaggtcaaattcccctgttttgggaatactgctggcgggaccagctttgaaaatatctgcaatgcagctggaaaaaagccgcaaattccgttggtcgaaggcaaaacgttcaaattccttgacggaaaacagggtgatggggtccgtgttgtaagctttgaattccatgatgccggcgtccgtattcgtatttgacaggcgtccctcaatgcctacgtccccgctcatgaagcgccccaggatcagggaggttcccggaaggggggagaccagggaaacaagatcggacatgatgttgccgcccacgtccgtaggcttcagcttgactatggcgaggcggagagttacggatcccggaacggggcggtcaaccaactgccatttcatcctcccgcctgtctgtttggatttgttttccagcacgttgcggatgtctttttgcagcccggccctgaattgtgccgccagcgccggggattccttggggaatctggctttgatgtagtcaatattgacgggggctacatatacttttagccttggggaattccagacggcctgttccgagggattataccagacgcctccaaaacaactctgcctggaatccgtgtgaaggggatgggtaatcaaagaggaaacgggcattgtccgggaactggaacaggaaaaaaccaaacctgttcccagcgccaggaatagccgtggaatagcgccgtgcatgcaggataagacggcatccgcccgggtggtgttcgagtcatgacccgattggctccgggagttttttccggagggggtgtctccggaaattccggggcggttccgtgcttccttcaacggtatgcatgatgaacggacgggtagcgggacggcaggaaatggacaatcgcataagaataggccggagcggggaaacggcacggtcagaagaactccggacgacaaggagacgcgcaaggttgccccgtgtccggatgcatgattgacaagccggaaaagcggggcatgctgttgatatgagatacgagccgcttccttcttccttttttgccggcaaccgtgaagaacttgcttcccgcctgcctgccggcagtatgctgattctgcacgccaacgacgtatttcctacgaatgcggacggcacttttgccctgcatcagaatgccaacctcttttatcttacgggagttgaccaggaagaaaccgtcctggtcatgaccatccgggaggacggctgggatgagattctgctgttgcgtgagacaaatgaacagattgccatctgggaaggtgcccggctctcgcaggaacaggcgagagagctgagcggcatccaggacgtgcgctggaccgatgaatatgatgcgttgctggaggccctggtgccgtccgcatccatggtctttgtggaagccaaccagcatccgcgatgcacatgcccggtggaaacgcgcaatgcccgcatgaccaaggagctgaaggaaaaattcccggacgctgttttgaagaatgtctatgaaatcatggcggatatgcggcaaatcaaaaagccggaagaaatcaaggctctcaaaaaagcctgcgacatcaccaatgaaggcttccgggaattgctccgattcatcaggccgggggtgggcgaatggcagattgagggattcctggccaacgaattcatcagccgcggtccgcgcaaattctccttcctgcccatcatcgcttccggaaaggatacctgcgtgctgcattatatccaaaacgacaaacggtgcgaagacggcgatctggtgcttatggatataggcacggaatacgggaattacaactccgacatgacccgcaccgttcccgtgaacggaaaattcaccccccgccagcgcgctgtgtatgaaagcgtgctgaatatgatgacctacgccaaaaagattctgaaacccggaatcctgaaatcggagtacgaacgcctggtgcgcgtttttgccgccggggaactcgtcaagctggggctcatcacacccgcgcaggtggcggaaaaaccgtccgatcctcccattgtccggaaatattacatgcacgggtgttcccacttcctggggctggatgtgcacgatgtaggcgaagccaaccccgttgtgttgccgggtatggttttcaccgtggaaccgggcatctatattgcggaagaaggcataggcatccgtttggaaaacgatgtcctgatcggggaaacagaaaacatcgacctgctgggagacgtgcctttgctgcctgatgacattgaacggctcatggcccggtaaaatgggccggatacggttctgaacttgacaatggggcccgtgtgggttttcattcccgtcccatcatgtcgaagaaactcaaaatagctcttcccaaaggcagtttgcaggattccaccgtggaattgttccgcaaggccggctacaatgtgtatgtgtccagccgcggataccgcccggcctgcgacgacgacgatctggagctcttcctgatccgtgcccaggaaataggccgttatgtcaatgacggtttcatcgactgcggcattaccgggcgcgactggatttatgaaaacagggcggacgtggaagtgctgacggatcttcaatactccaaggctacctccaagcctacccgctgggtgctggtagtcccggaaaattcccccattacctgtgcggaagaccttcagggcaagcgcatcgccacggaaggcgtgggcatcacggaacgctggcttcaggaaaagggtattgaagcccacgtggaattctcctggggagctacggaagtgaaggtgccggaactggtggacgccatcgtggacatcacggaaacgggaagctccatcaaggccaacaagctccgcatcgtggacaccctgatgacctcctatccccagtttatcgcgaaccgggaaaccatgcaggacgagtggaagaaacagaagctggaacgcctggtcatgatgctcaagggcgctttggaagcgcgccggaaagtgggcctgaaaatgaaccttcctgctgcttccctgaacggcctggtagaggctcttccgtctctgcgccgtcccactatttcccatttggcggaagaaggctggctggccgtggaaacggtcattgacgaatccgttgtgagggatatcattccccagctcaaggccctgggagcggaaggcatcattgaatacccgcttaacaagctggtttactagatttttttctcaccacagtaaaacaacaaacgaaccacaatcatgggatcgctcaaaaaacgccgtaaagcaaaaatcaacaagcataagcgcagcaagcgcatgcgtcagaaccgtcacaagaagcgtttgcgttacaagtcctaaggtttgtgcgcttcgctgctcaaactggcagtctgtccgatttccggaaaattccggcgtcctccttatcacggaaggacgccgttttttatgtatttgaatgagccaaaaaatattaatttgatttcatgttgaaatagatattgatgttttcttttttttcaatagattaggaagtaagttatgaggcgtgtgtttattttgataatctctatattactgttttttcagggaaatgtcttggctgctgatcagccaagatgccgtgtagaaagaagatatcttgccttctttactccttggggtaaagagcctcctactccgcctgacattgttgaggaggcattgggtgatatggtggaatctattcttactgaagctctaggcgcagaaacagggatagtggatatggatcatctagtaggggcctccatgaaacatacttatcatgttcatctatggtatgcctacagatttgttcataatcataaatttaaaactccatggaaaacggggatgaaaacacatttagctgatgggatgaaggatttttttgatccgaatattgaagggaaaaaaagtgctcaaagtgccgtgtctacagcaaaaagagatcttcttaagaaatttgaaaaggaacttaaagaagaatgtgaaaaacatcattgataaaatattatgaaaaaaattatattaataaacctcattttactttctacagggtttctttatgcacatgaaaaggatatgatgaataaagttcctagggatagcaaagtcaatttggaaaagaatgactcttcttcccctgtcgttgtagaaggtgtaaaaaaccgtggagaactggatagctggattgaaaattatgtggaaacaaattatcctggttataatataggtgacagggaagtggatctttccagtaagaaatcaatcattgaaactgtgtatttaaaaaacgaacagggaaatgtaatagaagtgtgttttgatattacggattatcgaaagaaatttaacgagcttcataaaaaagaaattattaaaatttctagagatctccggaaacaaaaagaacgtgtaaaagaagataaggaaccaggaagttcttatgattttcccattgaattgaaagatgctaaaactgagaaggaagttttggaagcacagaagaattatttggagaaaaattttcctggttatcaagtaatttcaagagcaacatgggtatttgggaaaaagtttattgatcgagtccggttggaaaaagaggatgatactagagttttgatgtttgatgtatcggctcatattaatgaatacagaaagacccatgagattaatttgaaagaaatcgctcctggtatgattagtgtgcaaaaatgaattttaatagtaagaaactattttagagaagtatttgttgcgccaatgcttgatttttatttttgtgtatatgagataggattgatgagtaaattttagaagttttttgcctatagaatatttattaaaatataaattaactgattaattataaatagaatataataaattaaatgttccatattttaaattgagatgcataattgttatttttaacgtttctgtgtttaaatttctgttcttttctctgtattttttatcagtggttgctgctgaaaatttatcctatcagcgtctggcatggcagatggagggaggggatgtacggagtattgccggactgtgtcgccaatatgtacaaaagaagttggaggcggaaaaaacgttttccgtggaatccctgttgaaggatcgggagctggcgcaggcttgctatatggcccatttctttgcgttggtggggaaggataggacttacatccttcatgaattgaaggacaaggagtatgttctgtggctgttgaatcatccggaagtgtttgagaagttgtcatttgccaaggcttcgggaaaggatactctggcagtcctgcgcaacatttggctgaaggaagggaaggaactttccggggttggccttaacatggcattgggggcggcgttggtttcttcatctcgggagccggaggcatgcgaagcgcggtatgatttttacaaaaagtcttttatggagaaaaaactgtttccgcagttccttacgttggagccgtgggatttcggaattcttttccgggggcgggaaagtattgaggaacttgcctgggcgcaggattatctagccgacaaaaagaagatccaggcggggaacgccgggtatgcctgttgcggattgattccataccggatgaagaataaacagggaatcagtgtgcatgtgggtggagcgttttacgatcacaaaccggtttccttacagatttacgtggaatatggaggcgtgtgcggcgccgtttccaaaggggcagccggttttgtgaaagcgaagggaattccttcctatacgattggccagccagggcattgcgcctttgtgtggaaagggatagacggagaatggaagataggaaataacatttatggatgggtgtggtcggagggcggttctggagggccttggaagggagccgtttccacgattacagagcttccccgtttttggaagaagaatgccgctgcatccaatctctgttattatttatccctgctggctgccgatccacagaaggcgggcacattactgaaagaagcgttgaaacggaatgcttccaattatcctgcgtggcaggctttgacgaagagaaatgcaaagcggtccgagaaagaaaaactggttttgctagaacagttcaaggaagctttctccggaaatcccaccatgtgggaatactttctgaaaaaagaactggggcttgattggaaaaaagcgaatggttatgccgtttatcccggattgctggctgaaaatgaatcgtgggattccgtggatgcctacatgcgtaatttttgcgctttagcccggagggatattcccgacatggccggaaagttgtcttatgaagtgaaaaccaagagaatctttttcaaaaactggctgaaattttaccagcagaataaagtagatcggaaggtgagagttcagacctgtgccgtcttggaaaaggcattgcccccgttgttgacccacgaaaaaacggctcttcaatttctcggattttatggtcagatacttgacttgtggaaagacaaacagctgtctgcgcgggccgatgcttgcttgactgcatggttgaaggaggcagacaaggcgcctgtacgcaaaaaggtggcagaaatagggctgaaagtagccactcatttagaagacaaaagggcgcttgtccgttatgcggaggctcaggaagaacattgaacagggttgtctgaagatcaaggatgttgttgtaatacagaagatggagaatcggctcaagtatttaataatgatttccagaaaggaaaatttgcgcaacaagcaaaccttctatttaaaggcgtttcagtgttatattccattatgtcgatttgttagcagatgtttcaatcgatacctgtgatagttgccgtatcctcttttcttcccggaatcttttcaggggaatggtgatggtaaaaacagtttcccggtgggggatgctggagacggtgatggcgccgtcgtgcgcttccacggcgcgtttcacgatggaaaggcccaggcccgttcccctgatttccgaggagtggtgggtttccacccggtaaaagcggttgaaaaggaaggggatgctttccgcaggaatgcccacgcccgtatccgtgacggtgatgacgcaggcgtcctgtgttttggcggcggccacagtaatggaaagtcccggctccgtgttttgcttgagggcgttttccaccaaattgaacagaatttgcgtccagtaaaaggggtctccataaagttcccaatccgtgggaatgtccatgtgcaggacggcctgttttttctcccggatggaatccagacgggagaagacgtcgtccgcgcaggaggtgaggcggaaccactgctccttcagaatcgccttgtggcctgattcgagtttggagatcatgagcatgtcttcaataatgttcatcagcctctggctgttctggtgcatgactccgatgaatttgcgggccagtccgggactttcctccaccagatcgtcctccatcaggttttccagatatcccacgatgatggtgaggggcgtgcgcagctcgtgggaggcgtttgccacgaagtcccggcgcatctggttggtgaggtagttctgcgtgatgttgcgcagcaggatgcgcttttctctgattggggcgtccgtgatggcgctgtccagatgccacgccgtgatgccgttttgcacgccgccgggggaattggcggcgctcagcgtgaattccttggtgacggggccgtccgtatcgaatgcttcctgaacatgccccagcaattcctggttgcagatcagggcccccactttgcgcccttccagcttttcttcctgaaagagttctttggccagcgtattagccagcacgatgtgtccggatggaccgatgagcaggaaggcctctcccagagcttccaggaagcgccgtttgtccgcgatggcctgttcctgcgcttcttccccgcgcttcagcaggcgctgagcgtcccgcaaagcttttttccgggctttcatggcggaccggcatacctggaccagatgccagttcaggtacagggaggccagaataaggatggttaggatgtagtcgatggccgacatggaaccggagtgttaagccttttcctccgggatgcggcgtcccggcagggtaaagcggtagccgatgctgcggacggtttcaatgcagtccgcatagggagccagtttctggcgcagccgcttcatgtgcgtgtccagcgtccggctctgggcctggtggctgtacccccatacgcaactgagcaggtcgttgcggttcagggtctggccttcccgttcaaccatatggatcatgagcttgaattccgtggccgtcaggtctacttcctcattgtcgatatagaatttgagggcgtttttgtcaaaagtgaaggggccgtattccgcaatgacgctgcccggcgtgtgctcgcaccgtttcagcacgctggccacgcgcaggacaagttccttggggctgaacggtttggtcacatagtcatccgctcccagttccagcccctggatgcggtcttccgcctgggccttggctgtcaggaagatgacgggaatattctgggtgcggctgtcccggcgcagttccctcagtacgccgtgtccgtccatgcccggcatcatctggtccagcaggatcagttccggcttgtcccggcgcgccacttccagcgcggtcagaccgtcataggccgccaggggcgtatggcccgcacgttccaggttataggccacaaggtctgaaatggcgtgatcgtcttcagcgataagaatggttgccatgtctgttttttacgatgaaagaaagggcggtgtcccgatattagatgtgacgattcgttcacatttccccacccgggaggcggttccggacagttaaagcctcctcttatgcaaacatactgtaacggaggcgtttccgtttggcaaggctggcccagattcaacttctcttccctgcgtcatgtgatacacttgctccgcaacagttgtattgttatgcgaagcgatagagttaaagcagggttcgagcgtgcgccgcaccgcagtttgatgcgtgccaccggaatgacggatgaggatttaagccgtcctttcattgccatttgcaattcttttaatgaagtgattccgggccatgtccacctgaacagggtggccgccctcattaaggaggaggtacgcaaggccggaggaactcccgtggaattcaaccttcccggcgtttgtgacggcattgccatgggccacggcggcatgaagttttccctggccagccgtgagctgatcgcggacagcgtagagacgatgctgagcgcccatgcgtttgatgccatgatctgcatccctaattgcgacaagattgttcccggcatgattatgggcgccctgcgctgcaatattcccactattttctgcagcggcggtccgatggccgccggcatggcggaggacggcacggtgctggacctgaacagcgtgtttgaggctgtcgcccgctttaaggcaggcaagattaatgaggcggaacttcattccctggaatgccgcgcctgccccggcgccggttcctgctccggcatgtttacggccaattccatgaattgcctgagcgaggtgatcggcctggcccttcccggcaacggttccctgctggctacttcagaggaacgaaaggagttctggaagcagactgcccgccgcgccgtggagatggctaaggcggacggccccctgccgcgagacatcgtaacccgtgacgccatcgacaatgctttcacaattgatatggccatgggcggcagttccaataccgtgctccatacgctggccattgcccgggaagccggcgtggaatatgacctccagcgcatcaacgatatttccagacgaacccccaacatctgcaaggtggctccttcctcccgcttccacatgcaggatgttttgcgtgcaggcggggtgagtgccatcattcatgaaattgccagaattcccggagcccttcatctggacgccatgaccgtcagcgggaaaacgctgggtgaaacagtggagggatgcggcattgcggatgaaaccgtgattcatccgttggaaaatgcctattcccgtgatggcggcctggcgattctgttcggcaatttggccgaggagggcgctgtggtgaaaaaggcgggtgtgcatccggatatgatgagtttccgcgggcccgccgtgattttcgagtctcaggaagaggcctgcgaaggcatccttgccgggaaggtgaagtccggcgatgtggttgtcatacgcaatgaaggacccaagggcggccccggcatgcaggaaatgctggctcccacttcctatattatggggcagggccttggcgcggaagtggcgcttattacggacggccgtttttccggagccacgcacggagcctgtattggccatatttccccggaagcggcggaaggcggcctgatcggcctgctgagaaacggggatatgattgagtattccattccggaccgcacgctgaacgcctgtttgagcgaggaggaaatcgcacgccgccgtgcggattggagacctacctataacagggtttcctcctcttggctgagccgttaccgccagcttgctacgaatgccagcaagggggctgtcctccggcgcggggaataatagctcgtattattcgacttatcccaaccaaatttcagccgccttcctccttaatggggatcgcggctgattcatctgccgtcgtgcggattgagatgccggtagttgtagtagatgaggccgagctcgtcgtccatgtattcgcacgagaagcggaatttgttctcttgcgccatgttgccttccgacgtgaccagccctccgtacggacggtattcgtacagggcgcggcgtccgcgcgcttccccgaagagggaggtgacgttcttcatcgcgtcgtgcatgcagtagagatgctccttcacctgcgtcccgttcgcctcccagcgcgtcatggccaggacgcgcgtggcctcaggttccgaggggtcccagatgtaactgcgcacaactaccggcgtttccccggtcaagtcgcactccgccacctgcaggtagtttcagtagaattatagacaacgtccatcatttcttctaaaaggagagttgccgagcatatccagtattttcttcccgtagctgaatcggttgagatgtcttttcataataatctttttgatcatttcacaatagggagcctcttcttcttgcatgttcatataaaaccataaaaaatcccacccatttttatcatctgggaaatgttctatataattttccgctgccaagtcaaaaatatccgccctgcttaaaatggcctctccgtatgcattgttttgaagcaaagataaaatatctttatctttactcgataagcggatatatggaataataactctatttaaataactatcgtcatcctgatgtaccatggacagcatttccggataccgtccgctgcggacttgtttgaattctttctttaacattttctcccaattcgcagaatgaatgatataactcgccaattgctgcttctgttgcagcgataagttcattattctttcctctgccttaatatatatcgaatccttgggaagcttttccatatcgtaaacgggtattggctgcggaggctgtatcaccggtacccctccttgatggcaagatgagaaaaatacgaccggagataagaaaaagtataatattttgctaaaaatcatattctttatatatggaaacatggacatcaagttcctgcttgagcatttcaatattgctgctacttcgtcaaggattttctcaaaactattagcagattcatagcatttttacaatgattaatatttttaataggaaacaaagcgattatcatttatgtaaaaaatctccttccgataaacagaaggagattttttttaattaagcagtttttgtgtattaattatataaaatcaaaaaatatcggaattatttactctaatcttgtttcgttgatttcctcgatttttcattagatcaatttgctgaatatcaagagctaggatatcctgaaaatcttacagcaagactattctttataattttgttcttgtattaccattaatattggtaattatattttcttttctatattttgtttttgtcgcattatattttttaggatgtctattactcaagtttaaccttattttaaaatttaaagattggattgatttcttgtgtgcgcataaacctgcctgccctctttgcaatcaaactgatacatgtaataaaggtaattgtaatatgtgtcactcgaatgccaatcctctgatttttgataaaaaggaagttaatcaaaataattttgaaaatatatctgatacttcaattatacaacctttgactatcactgatccttgtccaaaagagggttatcaaatagtttgcacaatctcttgtaatagtgttaaagagagtaatacctaaacgagaggacagccttttctgaatcaaaaaggctctttccaaaaagatggagctttttttgttcccctatgcaataggagggggagaacaagattaaaagggataactccgatttgttttaaacggtttctaataaaatcattcctgcaaaagggttccttccgacaaacagaaggaaccctttgtagaattatctaatttatttaatttgcaattgttaatatatttaacatttcagaacaattatatataattccatttatttttttaatttttaataagatcttactatccaaaatttaatattagaagaaaaaactagctatatatgatgatataaaaaatacaataacccatttaataatcagcttaatgtcacgtgcaataaaaaaattagtacactgattacgttgtaacttattaagcggacatttttcgatgaggaacgaaagagcatcattaatttgcttgatagaatcaaaccatttcgttttaaagtgtatattgcattcattcccaataatccatacatcaaatatttgatatttcacaaattttttaaatatctgtggattgatagctttgcctattttgtaggcatcaaaacatgaagcgttaatgatgattctatctatatctctatataaaatctccttttttctccaccataattttctgattattctatcattgcatagtaataattgatagctacttaatttaatagttaagtaaactcctatagaaaaaattgctgctagaataggtaattcaccattattaatattatctggattgcaaaaatttccataaaaataaacccaatataattccgcaagatactgttgcaagaacaagagctttacgaggttttaaataaatattaattattttttgagatgacattttagtgtatcggaattataattattgcttcctgtctttctccaagggtataagattgtttatttatgtcaatacgaaatacaacaatggtagaatgttgtatgaaaatataattgaaaaaagtgatggatttgacctaccagcctctagcggtatatgtggttgtgacatcaatggtaaattcgaactaacagaataaattctactagattccaaggttccgttgcttaatatcgtgctaggtaaggacaaggtaattcttggcaaagaattataaaattctgatccattatacttcgcaatgactctcaggcgaattcttctgatagtgctttttttaatttagttagcactattttatttacagcggaccaaaaattttttctactatttaacccagggattttaacaagttttaccataggcgcactaatagcccctatattagttagttccagtaaaagtagcatgattggaagttcgttgtccttccaatccctacttttttgaaactcctgatcatatacttattaaaaaaataagcacacagaggataacagcctctgtgtggttgtaattcgtaaaaaattatttcatttcaagatcaattaataacaattacagtttctatagaaactaatgaaaatgctataatcatgaaaacaatagaaagaatgaaagctataatatttgcccaagttctacatttattttttacggaattatttactctaatcttgtttcattgatcttccctcatcggagcaatctgaaatataactgcgcacaaaagccagtatttccttaattaagtcgtacttcactatctgcaaacaatacagtattttacttgaaattttttataaaatgtcacctctgaaaaatcagaggtgacaaaattaatttttttaatatatttattctttctttttaaaaaaaaatcacgctatttaaatagtcctttcaatcctttatacatcaaagaaaaaaacgtgtgaacaaaaagaggaatgcatccataatccaataataagggaatagattcgtattctttcatacctattccaggaagattcatagctaaatagattgcacccccacccaacagaggaatgcaagatgattttttggattttattacaaaggatttaaaaaatattatccaattatataaactaacaatacttccaaaaacaactaatatccaaaataaaattatattaatcaccattttttattaattctaattaaagtttataaattctttgtttagcaggaacgagtaattttatagccccatcaattccttttcctcccggacattcgatggactttttgggaacgacatacgattggactttccaaggaggagaaaatttattccccattcctggctgccattttccagaccaaatataattccataatgttggctctcctgccatgacccaagtattaggttttaattcagctccccatctagatacagtagttacctcaacattttcggcttctactataactgttggacaacaagatttcacaggagttgataatgcttttgcccctaatgcaatttctgcacccgtagcaatattttcggataattgcggagaaacaccaactgcctttgcagcactagttattgtttcatgtgtcattgttgaattatattctccagtaataagaaccctaagaccagcttgggcaacatcacttccatgcacatataaaatagctccagtgactttagacattgctgtaggctctggagccaaaagacctgcagatcctgcagttgcttcaaatccaccttccattacctgtaaagctccttgaagccttgtagtaatattatatttttcaatagtttttgcaacaacaattacctttcgttttatacctttccacaaaactttagtcaaattcttttttcttgaatttgatggtgctgataatgatattcttaatgattcgtatccagtagtacctgtccaaaatccaccaggaggaggaatagtgcctagataattaacaacgaggtaagaattattttttaaagataaatacagattccacccgccctgttccatgatgggatcgcggctgatccgcctgccgtcgtgcggattgggatgacggtagttgtagtagacaagcccaagctcatcaccgttgtattcgcggctccactggatgggctgggcaacatccccttcggcggtgacttctccgtaaggcgtgtaagtgtagactgtgcgcaggtaaccggctttctcgaagatttccgtgacgttcctggtcagatcccacccgtaggcgtaccaggcgccgtctttgcggatggccagcgggcgcgtagcctcaggctgtgtcagattctggaacaggaaccatcggaaggctccgctgacggcatctatggcggctatttgcaggtagccacggtacatgagcgcaggtagctgctcactgtcccgttgacgctcactttgcgggtgtgccgtctgcccatgtagtcgtaggtacattccaccacggttttggcgctttcatcaacgaagcacaccgggaggttttccacattgtaggcgacttgccagattcctgtagatatcttgatagctgacacccaaacacaaatagacctgcaattaaataactgcaggtctatttaaagttattaaatcatattagaaaaaactgcgtatcaattatttacttttcaaataaacactgtttaaatgtaccaattaaaagcgccgttttctttagacggtcatatttatacaacatgtaatccttaccaccttcttcatcattgcttagatgaattatatatagatttaatttttcatctaacatgaataatctttttccaaattcgccatctccgtttatgaataaatatgatattttttcttcctgatctacccaaaatttaccttgctcaatccttttttgaaatgattctctattttcttcatagaaaagatttggtggtaattccataatctctttcaatatcaatgttttatctttgatgttagaattagatatagaaataacagatataataaaaattaacaaaaatttcatgttattgattatttattttcccttttttcacattcttcatttacttcaagcgcattaggtataacaggatcggtacttatattcagaggaggcaatttacttactttagttcgaatcttgatattagatctcttcctgcgagcacatgctacagcagctttaaatctcatatcttgttcaagagaattttgatatgaattttctcctgcagggcttatgccaataacaatacatcctgaagaatgtttataattagctcctgcatgtatattatctcctccgtctcctgttctaaattcatcattaattgcatgtttataatcagaatcattcatccagtcgggtttactaggaatttgaatacctgatgttttatgcttagccacccgtcccttaatacttgttaaccctattcctttcttattttttggtccaaatggaggactattttctggggttaaagaagaattaagaatacctgtatctaacaaattttctgtgtattttaccccacgttctacaccacagtaaaattgaggtaaacaacaacatttattaaccataggatcatcactactgactgttatattactataaatagcttcttctctttgttcatatctaaaaacttctactattaatgtaaataagccaattttatcagaaaatgaaatgctattattattaacaaaggcgaataaattccagccgccttgttccatgatgggatcgcggctgatccacctgccgtcgcgcggattgagatgacggtagttgtagtagatgaggccgagctcgtcgtccatgtattcgctggagaagcggaatttgttctcttccgccatgttgccttccgacgtgaccagccctccgtacggacggtattcgtacagggcgcggcgtccgcgcgcttccccgaagagggaggtgacgttcttcatcgcgtcgtgcatgcagtagagatgctccttcacctgcgtcccgttcgcctcccagcgcgtcatggccaggacgcgcgtggcctcaggttccgaggggtcccagaggtagctgcgcacaagcttcggcgtttccccggtcaagtcgcactccgccacctgcaggtagtcccggtagaggtagcgcgcgtggaagcccgttgtccctccgaccgtcacttttttctcgaatctcctgcccatggagtcgtaggcgcattccacggttgtcccgccgtcttcgctttcgaatttcacgggccggttttccgcgttgtaggtgactgtccagatgcccgtggaagttttcaccagcgtctggttgccgtcggcgtcgtattgggggacgaatgccgccgcgccatttccggcgatgcccgcgtaccggttgagttcatcggtttcatagtccgtcgtgttgccgaattcgaaggcttccttccggttgccgatgttgtcgtactggtagccgaagcgccctccgggcctgagctggtctccgatcagttcgccgcggctgttgtaggtgaacaaacgcgtcgttttgggcgccgccgtgttccacgtgtccctgcgccgggtcggacggcccagcgcgtcgtagtcgtattcgtgccttgccggcgggttggcgcttccgggcctccggtagtcgatgacggagaggaggtcgcggctgttttcataggtgttgacccgggtcatgccgttggggtaggcgagttgttccacaagccctccctgttcgcagtaagtccaggagaagggcgtttccatgccttccgccgcgagggcggagaggcggcctttgccgtcataggacaggcgcgcctgctggacgcggcggccgtctgcgcttaattcataccccgccggacggccgagcccgtcatagagttcggagacctgccaggagaggccgtttgccgcaaggctgtcggtttccggttctccgtagagattgtaggcgaaggttcgcgttccggcagcatcagtgatttgcgtcaattgaccgaggtgatcgtagacgaagctctggccgggcgtggcgtccgagtagctgattcccaccagcagcccgcgggcctgttcgtaagtgcaggtcttcacgatgccgcgggcgtttgtttccgtggcaagcctgttgaaggcgtcccaagttttgtccacgtgcgttccgtcggcatacgttttgcgcgtttccagccccgtggcgtcgtcatagctccaggtggtgacgtctccatccgcgcggccagtggggtcttccgcgacgtctccttcctgcgccgcgcggaaggtggtcaggctcaccaggcggtcggcttcgtcatagcccaggagcaggggctgcgtccccgtcccccattcggccgttttccggcctctggcgtcgtatccggcgcacaccgtatttcccagcgcgtccgtcaccacggcggccaggtcaaagcgggcgtcgtactgcgtgacggtctcatttccggcggcgtccgtcacgctgacggcgcgtccggccaggtcggtccggatcgtcgttgtgttgccccggccgtccgtgcgggtcagggtcatgcccgcggccgtataggcgcgggcggccgtttccgtgatgcccgcgtggttctgctgcgagagcatcaggccgtccgccgccaccgtttgagccgtgacgctggaagaggggataacgctcttttggattcttttcgtattttcagcatactccgtccattccgccgaagtcaagccgcgttcgtcgatacttattgtttttgtttccagaactccggagagttcggacaggagccgcttccgtacggagacgagcggatgtccatctgcatggtagcgggtttgcgtcgtgaccagatagacgccgtcctccgcgttttccacgctgaaggcatattcccggatggggctgttgtccggtgcgggctgctccgccagggcgagcgtttccctggtcatgttgccgaaggcgtcgtattcgtagagcgtgggcgccatggcgacggccccctcctgcgttcccgtatctctccatgtgcggatgaggagcccctgttcatcgtattcggaacggtcatacaggaacccggcagtcgcgggcgtcacttgcacgacgctttgtccgaagccgttgaccagggtccgggagaggatggtggtctggtcggccagggtaacggtttccctcaggcagttatggtcgatgtcatagacatggtagcgttcgcgctgtcccgtgccgtattcatggagtacggagccgtcggggtgacgttcggtgacgagggtggcgccggcgggcgtcgtgacggtttccgtcaggccgttttcgctgtaggctgtcgccgtcacgcgacccagcacatcggtttgcctgacgatacggccgagcttgtcgtattccacgctttccgtcgtggtcatggctcccctgtcccggcgtgtctgcaggacgcgcccggcggcgtcccgggtgtaggtggtgatggtttccggggttacgaccgtgtctccgtcgctgatttccgaacggatggtttccaccagctggtgggcgctgttgtagccgtacgacgtcaggattccgtcttcgtccgtttccgagagcttgccgcagcacatccaggacgtggaggtgacgcggccgttgccccgggtggttttcgtgcggcggccttcttcgtcgtattcatgggcgccgcttgagagcagcagccagttgtcgccatcccagacgctttcctgttcaacaagcaccgtgtcgttggcggcaaggaacgattccgtcttgcggctctgtccggccgccagttcgccgccgaccttggtaacggccgtctttttgtgcgcggcgccgtgttccacggccgcctcatagtcatagaaggtttccacgccggcaatgtcccgggtgaatttggtttgcccggcggcatagggataggcggcggcttctccatacgtttcttccacgcttgtctgttcctggccggaaccggcggcagtcacggttttggtcacccgttccatgaggggagagcgctcataggcgtaagcggcggccgtcagttcgatttccgtgccgtcggacagcacccggaattcggcgacacgcgccggacggttgtcgtagaagcgcaggccggcgtattcggtccgggttacctgttctccgccgccggcccagggcgccgcctcaagcgtgacccgtccttcgccgtcgtattcatagcgcgtgtagccgccgtccgggcggttgatccgggagacgcggtactggctgttgtattcgtaggaggtcgtccgcgccagcggcgtgttgaaggcttccgtttcgcttaccagcagccagccgccgtccgtgtattgcctgacgctgcggctgcaggaaacaggctcggcatcgtggatgcccctgacggtctcaatgcgttccgagaggcctccgtagaggcggttggtttcaatggtgcggatgatggtgtcgtccccctggcctttggcgatgctgactctgccgggttcttccgtacgggtgatggtgtgggccggcagtccgcgctgctggcgcgtgatgacggtggtccgcacgccgttttcttccgaggacaggtaggaggaggttttatagggttctcccgttacttcgtatgttccgtcggccagagccgtgacggcggcgggagcgtaccattccaggacgagttctccgcccgctccggtccgggtgcgcatcagcccctccgcggcgctgtagctgcttaccaggctgccctcatggtcatacgtattgctcacattccggaagtagtcttccgccagaagaaccctgccggaggcggaggtcatgccgaccacagcgccggtttccgcggagaagcggattttctgcccgtccgcgtccaccagggaaaggtaggcgggggcgccggaagcggcaggagccagagtttcatccagcagctgcaccctgaagtcgcgcttgcgggagatgcccgcaggcagggccgtatcggaaccggcctgcacgttgaagtaaagcgcggcgcccaccggcggcacgatggtgatgaggccggacgtttcgtccagatgggcgcgccaggcccacgggctcacgtatttcaggccgccgcaggcttccgccgtttcacgggcgttttccgcggaacggaggctgaaggccgcgggagacggagcccctcccctggccaggaattcggcctgggacatgcagatttccacgccggggtcacccggcagtttttccgccgcaatggtgtattcgttgccttccgcgtccgtgcacgtaccgcaacggcagcagatttccttttcttccggcggcatgtccgaagaggagctgctggaggagctggaggaaccgccggagcttccatgggcagtcaccgtcacggaatagcggcatacggattggttgtattcgttgtgcggtatgtcgatgttctggtgcgtgatggagagggcgtacgttccttcggatagttcaaaggagcctgatttggtccattcctggtggcctcccagttctccgggttcatcggcgtcaggggtcaggtccagttcgaaggtgccgcccgggccggaaatagtcagcttgccccagtcgtccaccgtcaggctggccacggccgtggccccgccttccgggacgctgaaggtgtcgttgaccggggtcatgaagacgtcggcaccggcagacgtctgaacgaagttgtcggatttctcataaataacggaatccgcgccgtagggctgaatgggtgtggacatggcatggaggggcgctgcggcgctcggcgcgccgggctggctggccgcatcgggaagcccggcggcggggttggagttcatcttgttggcggaacccctgttcaacgaggggtcgtcgtttggttgatcgttggtaaacattgtgtgatggttgtggtttgagtgcgacgtctattgacgacggttaggtcgatttagtttccttcactatgattgcttgccgcgtttctggaaatctgccgcccatttcttaaaaaagtgaatttttcttcccggagacgtttccggaggcgacgcgccctgctttcctccagatgaatgcttctggctgcccgtgacaaattcccttcagcgtcaatcaatgcctcaaccagctccctttcctgcggctccagggattccatttcccgctcgaagtcttcccggaacatcagcccggaaaggaagtccgaatgctcgtcagcgtcaatttcccggccattttcatattcaagcggacgggcttcccgcagcagcagcctcttcttccggttcctctcgcgcaaatagcgttccggctcaaaaacggttgcattgctcaggtatgttttcatgccggcggcgccgcttttccggtaacggcggcaaatttcccagcatcggattctgaaccgttggaggacatccagatattcttcctcagatatctgaaacccgatggattttgcttttgatcggaggcgctgagaaaccgttgaaggcgaaacgggatcttcgcctcacgacacggcgaggtatcaggtatttcaccggagttttgatgcggaggtgtccggaattgaaaaaatttccggtccgggaactgacgccggagcatggcgctcattttccggaggttatgtttgcatcccacaggcagcgttacaagggccgggcggtgatgaggatttgatggagaggggaatttcgtaaggtcccggaccagtaaaaagggaggaattctgaatgtctccgttcatgctgtgcttcggcggctcctggcgggatacggggcagggggacggcctgttctatcctcccaattagccgacgcgttagaggttgctccgggaaaaagcgggatggggtggtacaaccgctttggagaatagaatgcggatgcgcggaggcataccaatgtttcctgctacgccaaatggttcagggatttttgcctgcctcagctggaaatgaggcataagggagtttccggggctattccctaggcaggaagtagccgcgctgtttttctgagatgggcatgtccaggcgttccataacggccagcatgtcttcccataccttgcgtttttcccgcgggctgtccgatctgagcagataactgggatggtaagtgacgcgtacgggaatgccgttaaggtcgtggaacctgccgcgcatggaactgacggatccctgttcccccaacaggcctacggcggcggtaccgcccaaggctacaatcattttcggctggatgacccggatttcatgcatgatgatgggcaggcacgcttcaatttcttccggcgtgggtgcacggttattggtccgctggttggggagggccgggcggaatttgacgatattggaaatatagaccatgtctctggagagccccatggcccttaatatctggttgagtttttccccggcacggcccacaaagggctcctgctgcacttcttcataatatccgggagcttccccgatgagcatgagtttcgtatggggattgcccgtggcaaagaccatggtgtcccgcagggagttgagttcccgcgccggtttccagttctgcgccagattacggaggtattgcagcttgtcttccattgtcccttccgggagggtaatggcagaggccggttccctgttttgcggaaacagctccggcggttccggctttccggcaggagcggagacaggagcggctgcctgcaggggcggcggttccggagaagcgggtgctgatgcggcgggacggcctccctgcctggaagccacgtaccatgttctgagaacgtttctggcttcatccgtcaggctcgttcgcgttgttccctgctggatcagggaatcaagataatggcggaaaaggctgttcggtgtagcgctcatgggaggataaagccagattagtccataagaggccgtctgtcacgacgattcgcaggttccccggccttcatggaacgctcctctccgggaaatgacacggtaaaagatggtatcttttgcaagggaggtagcaaattggggctttccggttcaggaatggaaatgcagccggctctctcaaaattttacttagtttacgtatgtctttttctgaagaattaaacggtttgatggattgccccactcccctggtacgccgtttcatggcgttgctggaaccggttgacgacgcccgcctggaggagatggcgcaggagagccggcgtctgacgcggctgcatttcggccggaccatccgcctgttcgcccccatttacctgtccaacgaatgcatcaataattgcaagtactgcggtttttcccgggataatcccattatccgcaccacgcttacggtggatgaagtggtgcaggaggcccgctacctgcacggcctggggctgcgcagcatcctgctggtggccggggagcatcccaagttcgtttccgacgggtatatgcaggaatgcctggacgccctgcattcctttattccatccctggggctggagatagggccgttgccggacgaccgttatgcggagatcgtccgccatggggcggaacaattggccgtgtatcaggaaacctataaccgggaagtgtatgaaaccctgcatacggcagggatgaagaaaaatttcaactggaggctagactgcccggaacgcgcctaccagggcggtttccgccgcattcagataggagccttgttcgggctttctccgtggcggcgggaggccatggctcttgccgtccatctggattacctgcagaagcattgctggaaatccgcgctttccgtggcgtttccgcgcatgcgtccctacgccgggaattacgagtatgaacctgatccggacttgatgctggatgaccgccattttgtccagctcatggccgccctgcgcatctgcttccccaaaataggcatgtccatcagcacccgtgagcccgcgccgatgagaaatgccctgatgcatttgggcatgacccacatgtccgccattgcgcgcacggaaccggggggctacacgggcgtgggaacggctgccgcccatttgacggtgcggggcaaccgggtggatcttcccgatgaccgaaaagggaattgcaaggcgacggagcagtttgagatttccgaccagcgcacaccggagcaggtggtcggagccatacggaatgccgggctggagcctgtctggaaagactgggatgccgctctggatgtggtgtaggagaaccttctcacgtctcatttccttggaatgacatccatatcaccgtgatgttgtgatggagcattgacggcatgctccggctgtcatatttccggtagcgatgattcgttattattgggggaggttttggccgttcctcctgtttgcgttcggcattgaggcggtggaaaatctgtttacggtatttttcgaataccgcaacatggatttcgggttgcttcccctcctgaaaacggcgtacgtttttgtgacggagtttgccgtcaccatgtgctactggcttattccctatgccgtttatttgtggattctgccgcgcgggaaagcaggagggaaggcggacaggtggctcacctccgcatggtttttcctgtttgtgctcgccaatctgtttgaagatgtggcggaagcctttttctggaacgaatttgaagccagcttcaatttcattgcggtggattacctggtttacaccaaggaggttatcgggaatatttacgagtcctatcccatcattcctattctgggcggcattctggcggcgtccgttctggccgtctggggaatgaagaggttcctgcttcccaggaacggggcggttcctgccggatggaaacgaggctgtgtggtgctgttcctgctggcctgcgtcacggggggatattggctggtggatatcaaggatgcggatgccgtgaacaaccgttataattcggaaatggccaaggatggcctttacagcctgttcagcgcctttctcaagaatgaactggattaccgcgcttattaccggacgctgccggatgcggaagcggcggcgtttctggcccgggagttcacggcggatgacacgtccgtgccggaggcttcgtccggcagcgtaaagaggcaggtgcgtccttccgggggggctatccgcccgaatgtcgtggttgtggtcatggagagtatgggagcggaatttttgaacgagtgccgggaagacggggctgacgtcactccgtgcctgagccgtctgggaaaggaaggcatttttttcccgaatacttatgccacgggcacccgttccgtacgcgggctggaagcaatcagcacatccctgccgccgcttcccggcatgtccatccttcgccaggaaggaaatgagcatttgcagaccataggttccatattcagggacaagggatatgatctcaaatggatttacggcggctacgggtattttgacaacatgaattattttttcgggaacaacgggtttcaggttctggaccgtaattccatggatgattccgaggtgacccattccactatttggggcgtttgcgatgaagatttgttccgccgcgccgtacgggaggcggatgaatcctgcggacgcggcaagccgtttttgcaggtggtgtttaccacgtccaaccaccgcccctacacgtatccggaagggcgcattgacattccttcccacacggggcgcatgggggccgtgaaatacgcggattatgcggtaggcgcctttgtggaggaggccagaaccaaaccctggtttgacaacacgctgttcgtgttcgtaggagaccacggcgccgggagcgcgggaaagcaggccctcaatccggaaacgcaccgcattttttccattttctacgctccggctttgctgaagccggaacggcgggacactcccgtgagccagattgacgtgctgcccaccctgctggggctgttgaactggccgtatgatgcggccttttatgggaaggatgccttgaagccttcctatcaatcccggtattttgtgagcaattaccaatatatcggctatttgaaggggaaagacatggtagtgctcaaaccccagcgcggagtggaatttttccgggacggagaggccgttgagccggacgggcggatgaaagagctggaaagggaagcggtttattactatcagcacgcttccggctggcgcaccagtttaaaggaataaggcccccgcaaggtgcggaggccgtgattttggcggcctccgcccgcgcacggaaaatgcgttcaggatttgcttccgtccctgtaatcctggagtgcgtcccaatggaacgtgaagtgcttctgcatgtgcagcccgttggcgagaatgaacatgagggaaatgcggaattcgttattgttcaatccttccagctcttttttgtcaattttcatggagaatttcccgctcttttttccaaggcgccgggagaaggaaacggcgtcatagtcctggttgaccgcataaggaggatcctggatgtaaacattcagagctttgacggtctgggggcttttataattgccggaaaccagaatctggtctcctttaaaagaaatggctacgtccccgacctccacttccggcttgccttcgtagaattgctgggccggggtgacggaaaacacttcacaggcatccagcagggcgcagctggccggggtcaggaacgtgggactggtcccgaacgtgtaattgcccgaacccatcagggctgtgccgtattttttaccgtccgaggcggtctgatggttgtgcggcagattaaggccgtgccccaattcgtgggccatgcctccataccatttggtcagcagccttccttcccttgttttctgccccaggtgtttgatgtcgaaggccggataatccagggcgaaacagttgcgccccatgccgtaaaagggaactccgccgggattgtcggggccgttcttttcgtcattccaggtgggcatgatgatgagcgtgtgctggctttttttcctgtccggatgggctttgaaaaattcgtcaagttcctgggccgctttccagccgcctccgttttcataaggataatgggccgccggatttttggccttgtattcaatgatgttcacgcggcctggggatttgatgtccaggccgaaggaacgcgcgccatagccatgccgctgcatttccttgccgtaaaactgctggaggtaaaggagcagttcgctgaggcgccgttcataatccggaacgggttccgtatcactgcccagaaaataaacgatattgagctgacgggccgtttttttcagggcaatccggtctttcagggcgtccggaacggtgacttccgcaaaggatgtaccggaggccgctcccagaaagaacagagaaaaaaatgcggagagaagtcgtttcaacatacatgccaaagtaggggcgtcatttttaaagacaaggaaatttactgttctcgccgccattggaggaagcgtccctgggccgggagggaaataatgggggaaagaatccgtcatgtggcggccgataagttcggaatggctgaaagatagaggttgcgaaggcagtaaatatgtgacattgtttattaaagcatgcatttccaatctctatatttatctgccgtggcggtaagtgccgtttctttcgggtggggggctctggataagccttccgcctccaatttgatctggtctgatgaaccggccgtagttgtttatccgcaggaagacaaaaattccgagggcagttttggcaagtacagaaagcctgcctccgtctgggaagcggaggggtatcccattggcaatggccgcgttggagccatgattttcagcgctcccggccgcgagcggctggccctgaatgaaatcagcctttggtccggaggagccaatccggggggagggtacggttacgggcctgatgccggaacgaaccagttcggcaactatcttccctttggggatttgtttgtggactttaaaaaaggcgaccagccggcttccctgtctgtggaagattttacgcgctccctggatctccgggacggtattcataaagtgaattacaaggcggacggcgtaacgtatgaccgggaggcattctccagcacgcctgccaacgtcctggtactgaactataaagccagcaaccccggccaattcagcgcgaatttttccgttaacagccagcttggagcagatatttccgccaagggatccgtcatcacctggaaggggatgttgaaaaacggcatgaattatgaaggccgtgttttgatccgtcccaaaggcggtacgctttctgcctcgggagataaaatttccgtgaaaaatgcggattcctgcatggtcgtcatcgccatggagacggattacctgatggattataaaaaggactggaagggtgaatctccctccaggaagctggaccgttatgcggccaaagccgcttctgcggattatgccgccctgaaacaggcccacatttcccagtacaagtccatgtttgaccgggtgaaggtcaacttcggaaaaacggaggaggatgtagccaagctgcctacgccaaagcgtctggaggcctataagaaaaatccggcagaccccgatctggaggaaaccatgttccagttcggccgctatctgctgttgtccagttcccggcccggtacgctaccggccaacctgcaagggttgtggaatgattatgtcaaaccgccgtgggcctgcgactaccataacaacatcaacgtccagatggcgtattggggggcggaacccgccaatctttccgaatgccatgaggccctggtcaattatgtggaggcaatggcccccggctgccgggacgcttcccaggcgaacaaggggttcaataccaaggacggcaaacccgtgcgcggctggacggtgcgcacctcccagaatatcttcggtggcaacggctggcagtggaacatccccggtgcggcctggtatgcgctgcatatatgggaacattatgcatttaccggtgatagaaagtatctggaaaaacaggcgtatcccctgatgaaggaaatctgtcatttctgggaagaccatttgaaggaactgggagccgggggcgaagggttcaagacaaacggcaaggatccgagcgaagaggagaagaaggatctggccgatgtgaaagctggaactctggtggctcccaatggctggtctcccgaacatgggccgcgtgaagacggtgtgatgcatgaccagcagctcattgcggagcttttctccaataccatcaaagccgcccgcattctgggcaaggacgccgcctgggccaagagcctggagggcaagctgaaaaggctggccggcaacaagataggcaaggaaggaaatcttcaggaatggatgattgaccgcattcccaagacggaccaccgccatacgtcccacctttttgctgttttccccggcaaccagatcagcaagctcaagacgcccaagctggcggaagccgcccgcctttccctagaatggcgcggcacgaccggagacagccgccgttcctggacgtggccgtggcgcacggctctgtgggcccgcctgggcgaggggaacaaggctcatgaaatggttcagggactcttgaaattcaacactttgccgaatatgctgactactcatccccctatgcagatggacggcaacttcggcattgtaggcggcatttgtgaaatgttggtgcaatcccatgccgggggcctagacatcatgccctctcccgtggaagcgtggcctgaaggctccgtgaaggggctgaaagcccggggaaacgtcacggtggatttttcctggaaggacggcaaggtaagcaacgtgaagttgtattccgcccaacccaaggtgttgcccgtgcgcgtcaacgggaagatgacccgcatgaaaaccctgccgctgaaatcgggaacggaatcttcgccgtccgcggcccggtaaaaaaggaaatccatgatccggttttaattctggaactaaaaatagtcatggcttccagtcctttcgttagggctgggagccttttttatcctggacctttgcggaagggacggtatttgtttcaaaggaggagcttgctgaatggcgcgttccgaaagaaggaattcctctcgggatgtaaagattgggaagggttttcgcaaggggcggtccttcgccccgtcttaaggaaagaagggctgcgctctcatttcttttccatctgcctgagcagggagcaaatggcgcaggaatggagggaacacaggtcttcgtgaatttgaagcaatgcctggtggtgccaggctttcgcaagaaaggcgtgtgcatccggcctgccgcccagcagggattggtggacggagaggacttttgttcccgcctgtccggcccggagggaaagataatgcttccatgcatgttcgtcatctttcatcggaagaaggtggttgatgatgaagtccagaattctatcccggcccatcagggccatggggcggggagacggtggggaaggaagcgttacatgggtgctccagtaggggtgtgtaagggaggagaggtacttcgtcagctcttccgtatgtccggcaaggcaaaggcgcttaaacgcatcaaaatctgctgcgatgacggccagagcccctacgcgcctctgcggatggttggccggcctgttgccggaatacgtccagggaaaggagcggtccggcgccagttcaaattgcgcccgcaggggccaccattgagcccagagttttttgtggagttctacggcttccggtgtgcaggaggccggaagaacgggaaggaggaagcccgccgtaccgaaaagcagggcttccggacagttccggatggaacgcaggggcgcccgcagggccaggtggcgcatggcggttttgttggcgtgatagcccagcgtttccgccaggttttcaaaaagggcctgttcctctcctgcgtatttggcgcgttccgcatggcggcggtgcttgttccggaacctgtaggctgccgctgattggaggagtgtttccagaaactccggagccatggatgccagcagtccggagtggcggcagtggcgtaccggggcgctgccggaaggggatgttcctgaccgcgccagcgcagcggggggaatgacagccagaggaacgcgttcatgcctggcattgcgggtgaaccatttcctacggctgggcgcgcaggcgaggtgcaggatgacgccgttaaaccccgggttggaaccgtgcccgtggcgttcccagtcttccggcgtgggatccagttcgatatctcccgattgcgggacgccattaatgcatatcctggcgtttagaaagtccggtccggcggatttattccagttcccgaaatccagaatgtgaacgtccctgcctgaatcatccgtaaaagaggttccaaatactccttccagaagaagaagctgaagagtccgctcgtccggaagggcggaatgattggaaacggaatgttccctgacggcggacggcccttcttcccttgctgcggaaagggcttcctcatacagggaggccatggagcgcaggtccatgtggaggggaggtatttttattgatctttctgccgttccaattcttctttcaggcagtcggttacgttgcggaatttttcttcgttctcttcgctcatttcgctcagggtcaaatgggagttgagaacgtggagagtttgctccttggcatccaagtgaacggaaggggcattttcagtacccagggcggcacgtatctgctctacttttcccctccagggggctgtgggcggttcaatgctgagcagggcgtccagccccaggctttccagggcgctcaggcagcgttcgctcggggaagcgatttggacggatcccccgatgggaagcagccgtcgggacaggcccgcaagagtgcccatgaaggtggagtcaatgccggagcaagtttccagatcaatgacgatcagacgccctccggaagcgatgtaatcgtcccccagggatttgacagtcggactattggcaaaacttccgcgtccggaacaccggacccaaagaaattcatcaaaaaggccgaaaaggatggaagaattgttattcacgtcgttagaaaatggaaaccatatgaataacaagagaaacctctgcggtcaagtcaggatttaatttgcgcgccgccggaagaaggttcgttttctcgcatgcagaaccttttcccgcggcgctcttttcgttattcggagggatgcctcaggagttcttggtgccttcccccgtaccgggcaggaaacggtaataggtttccagcatcagcgttgccaggcactggcggtagatgttttcagatttattgctcatgccggaaacgtatcctacgtcatttttccggaaactgccgtccgcattctggccgctgagcacggcgtcccggaatgctttgttgtaagaggtccatacgtctcctccgcggttcatggcagcctgcacgcagtagtaatgcatgtagagattactcttgacattttccgtgccgcttccctggccccactggagggtcttgacgttgttcttaatccagtccaatcccttgcgggctgcaccgccggagccgtcgcccgtcatttgcagagaaagcacgcctacgcctaccagggaggaacggggcatattaccgttttccttataggaaaatttgccgtccggcatgacgttcttgcgcacgtagcttgaggccttgcgcagcgtagagcggatttcccctttggtaggcttgatgccgccgtgttcggcagccttgagagcctgcacgttccacccggtgacggaaaggtcgatgtccggattaatcttgttgttgtagctgtagccccagcccccgttgggacactgggcgtcaataatcctgtccacggcttttacgacgaccttttccagattggagatggaggggatgtccatctgtttgcagaaggtataggcttcgcacagggcataggtggctaccgcgtggtcataacagatttccttcagggcgggctgttccgaaaggacggggtttttcatgcctaagtccaccaggaaggaaatgcctttcaggacgttttctccgaattcctcggaaagaggggtttcacagtgggccaggtaggccagcagggaaatgccggtcatggaagcgcggaattgcccttcaccccaggagccgttgccgttctgctgttttttcagccagcggagggatttgactacggcttcctcgcactgcggggtgcccccgttttccgtgatgcgcttcatgcggtcgttcaaatcgcagcgcttggagatgatgccgggaatgcctcccccgtctccgtcgcccgtgccggtgccgaagccgtcgccgatgtcaatgcccatggagagttcttccgaggggacgtccacctcaatatccgggttgaccaccgcgacgtccgccgtggcgacggcggcgatgaccttcacctgcgcggaggtggaggaactgctggggcgctgggtggtctgggtgacttccggtgtgtcgatgtccgggttgtcgccttcctgggtggcgtaggcgaccatggggggatcttccggaacggccacgatgatgtgcaccaggtagaggaggaggcccatgagggcgatgccgaggaaggagacggaaatggcggcggtcagtgtcttggtccgctgcttcttcaattccgcaagggcattttcagtactttcaatgtggagactcatagagggaggtgtctggttggcatcaaggcaaaaactcccgcatttctgaaaaatggggagaattgccctgtacaggtatgtattgctggcctgcctgtttacaaggctggcagcgtactaaagccagacacgcctgtctgtcaatcagattaggaattcctggtgccttcccccgtgccgggaaggaagcggtaatatacctccagcatcagagtagcgaggcactggcggtaaatcttgtcgttgatggaacctccattgctgttcacgagccccccggtcccgggaatccgttcggggtgaagcttccatcggtggcctgggctccgagggtggaatcacggaaggccttgttgtacgctttccatacatcccctcctcggttcatggcggcctgtaccccgtaatagtgctggtagaggttggaggaagtattgttcgccttccagttgaacggctggttggtgttcttgagcatccagtccagtcccttgcgggcggcgctgtccgaaccgttgccgcacatttgaagggaaagaacgcctacgcccaccagggagggacgtgctgcggcatcttccctgcctttctgcatgtaggtgaagaggccgtcgggcttgccgcatttctggcaataggccgcggctttgcgcagggccgtgcgtatttcgcctttggaggggcggatgccgccgtgttcggcggccttgagggcctgcacgttccatccggtgacggaaaggtccgtatgagcgcccgccttcgtgttgtaattgtaggcccagccgccgtcggtattttgattgtccacaatcttatcaacggcttttatgacgaccttttccagattggagatggaggggatgtccatctgcttgcagaaggtgtaggcttcgcataaggcataggtggctaccgcgtggtcatagctgacttcgttcctctggggaaccagggagagaacgggatttttcatgccctgatccaccaggaaagagatgcccttcaggacagtttccccgaattcttcggaaagaggcgtttcgcagtgggcaaggtaggagaggagagccatgcccgtcatggcgcatttgtaattatgaggagccccgccccaggaaccgtctttattctgctgttttttcagccagcggagggatttgactacagcttcctcacactgcggagtgcccccgttttccgtgatgcgcttcatgcggtcgttcaaatcgcagcgcttggagatgatgccgggaatgcctcccccgtctccgtcgcccgtgccggtgccgaagccgtcgccgatgtcaatgcccatggagagttcttccgaggggacgtccacctcaatatccgggttgaccaccgcgacgtccgccgtggcgacggcggcgatgaccttcacctgcgcggaggtggaggaactgctggggcgctgggtggtctgggtgacttccggtgtgtcgatgtccgggttgtcgccttcctgggtggcgtaggcgaccatggggggatcttccggaacggccacgatgatgtgcaccaggtagaggaggaggcccatgagggcgatgccgaggaaggagacggaaatggcggcggtcagtgtcttggtccgctgcttcttcaattccgcaagggcattttcagtactttcaatatgcaggctcatacagtatgtgaagcttcctgaaaataatagaatgtttttccggttgaggcgagttcaaaaattttgatggtctatagggtggtaaatgaccagatatgaacaaaatggaattttataatgaacggcttatattggttgcatcatatacccgacgggggcgtctgccgggacatgggctgtgtttctggtttgccggagaggaatggaaaaggctttttgaagccgggaaggagaagcagcacgccgggaaccgtttgcctttgaatgtttttagctgtggccggcagaggaagaaagagcggttccgggagaggagcgtacgaagaaatttgaaaaaacaagccctgccatggagggcatggcaggacggaaaagagggtggccttttgcgggcagaggcattaatagtggccgcggcgcgggccagtcatccacttccatgcggtttccacaatggccccggcatccttgcacctggcttcccagccgaggatttccttggctttcttcggattggcaatcaggcggggcgggtcgccttcgcggcgcgggccgtagcggacgggaatttttttgccggtgactttttcagccgtttccaggatttcccggacggaaagtcccaggccggttccgaggttgaagcattctgtggccccgcctttcatcaggtagtccaccgctttcaagtgggcgtccgccaggtcgttgacgtggatgtagtcgcggatgcaggtgccgtccggcgtgtcgtaatccgttccgaagacttcgatgtattccttttccccggtgagcgtgagcaggatgttggggataaggtgggtttccggttcgtggtcttcaccgatcaagccgtcctcgctgcaacctgaggcattaaaatagcgcagaaaaacgcttttgagaccccaggcgcggtcgcagtccctgcaaactttttccagcatgtacttggaactcccgtaaggattgataggatcctgcttttccgtttccgggataggaatctgggtgggaacgccatacgtggcgcaggtggaggagaaaacaaagcgcttgacgccggcggcttgcatggcgcccagaaggacgaggggcctggcgatgttgttcatgtagtacttgagggggttctggacggattcccccacattgatgaaggcggcaaagtgaatcacggcgtcaaagttgcccttcatcaggagaggatataccacggaggcatctcccaaatcccctttgaccagtttcacttccgggtccacgagggctcccgcgtggccgtacaccatgttgtccagcacggtcacgtctgcgccggttttgacgagctggcgtaccgtgtgggaaccaatatatccggctccgccggttacaagtactttcatgattttatcaaatttgctgttgagccggtttaactttttctccggcaaaggcgtccggacattttggagtctgcggaaccttccggttcactgcaggctgaatccctgttccagacgcctgtaaaagtgacatgttttcccctttttgtcaatttgcgatatatcttgccgccgtctctccgttctttgcctgcggcggttggagcttctccgttttcatgccggaaactgccccgctttttactggctcctgacaggcatttttgcgaacatcacttcattatgaaaccgtccgagatcaggaatgttctggaagaccatgaagtgcgccccagcaagtccctggggcagaatttcctgacggatgaaaatgtggcccgctggattgtggagcagctcgaaatccggccgcaggattgcgtggtggaggtagggcctggaaccggctccctgacggaacatgccgcacccctttgccgcaaactggttctggtggaatttgattcccgtctggcggagtaccagaaagagcgctgggccggtgatccccatgtggaggttcaccatgcagacggcgcttcctgggatccgcgggggctgtttgcggaggcccctgtcaaattccttggcaatcttccctattccgcggggggagccatcctccagaatttcctgtccaggcccagtgctgtggaacgtgccgtggtgatgctccagaaggagtttatcgatcgcattctggcgacgccggatgatgatgccttcgggctgttgtccctgcgcatccagaaaaactggattccccgtgcccttaaaaccattccgccggaagcgtttcatccccgtccgcgtattgattccaccgtgatgctgcttactccccgccctgcccgcgagctgcctccatatgacgaccgcctgatggatgaactgatgcgcaaggctttttcccagcggcgcaaacaattgaaaaaacagctccccgcttctcctccgtgggagggcgtggctgcttccctgggactttccccttccgccagggctgaggaattgaatttgtcccaatgggtggaattggcgcgcgtttatgataccaatcctctcaaggatgtggcgcagagcggagatgaattgtttgacatcgtggacgaactcaatcaggtgacggggcagggcacgcgccgggaaatacatgaaggcagccttcgtcatcgcgccgtacatatgttcctggtcaataagcatggagctgtgcttctccagaaaaggtccctgtggaaagacaggcagccgggcaaatgggattcctccgcagccgggcatctggatgccggggaaagttatgaggaagctgcggtgcgggagctgaaggaagaactgggggtgtccggctgcgggctgcagaaaatcgcggattttgacgccggagaaaataacggctgggaattcatctccctctatgaagggcggtattccgggaaggttcgttttccggcggcggaggtggacagcgtgcagtggttcacgccggagcaaatccaggcgtgggtggaacgccgtccgcaggatttctcgcctgcgttcattccctgctggaatgcatgtctggtcgcgaatagaaaaaatcattctaactcaaatacatatcatgataaaccctgatcaattatctccggaacagatccagtccatccggacctgggcggaagaaggactggatttaaacgccatccagaaaaggctgcatgaggacttgaacatcaagctgacgttcatggatacaagattccttcttcaggatctggatatccgcatcagccagccggagccggaacccgaagccgagcagcccggagagcttcccggaacaatgcctccccctgcctccctgctgggaaaaacccaggtaactgtggatgaaataacgcctccccacgccctgatggccggcaaggttttattcaagagcggcgcccagggcgcatgggatattgaccgtaccggccgtatcaactgggacgttacgcttggagaacctacggcagacgacctgagggaatttgaaacggaactgcaatccgtcattcgcagccgcatgggagccatgtgagggaaacggaaaatatttcgcttgaaatggactggaagcaggaacttgccgggtggcggttatttccaataaaagccttggctggaatggaaaatgccgtgtccgcatgccattcgggagagaatgtctgcccggaaaaaatgcgcgttcatttggttccatagtaaaataaaagcaacaaaaggactatcatggaaataccggaggaaatgattgaaacgctggtgcctgccgttcgggagcagctggagtcgccggacaccgcttatgtcaaaaactgtctggaacgcctgacggggcgggaaaaactgggagaacaggaagctctggaactgatggcgcaggctctggccattactattaatgcgatggtggtggggggccgctcctttgattcgggaaagtacaaggcgctgttgaaagatctcccggctcttccggatgaggctccgtgataaatctcgacaatctccggaattgattcataatcctttctttcacttgaaattttatggcaaaaaaaccattagaaacaggtgctccggaagcgtccgcagctaaaaaaacggctgctcgcaagacgacggccaaaaagacggcctctactaccaaaaaggccgccgcagctgaaaaaaaagctgttgctgacgccgcttccgtagaagcacccaaaaccaaaatcaaaacggtcaagtccgccccgaaaaccgcggtgaagacaaaaaccgcgaaaacagccaaaaaggcggctgatgaaaaggcccctgtctctgaaacggttgttgccccttccgaggccccggctccttccgctcctgtggaaaaggagatgatgcccgaagctccccagaagccccaggctgccgctccggtcaaggtcaagcgggaatcgttccgccccaatcgcaatgcggaacagcaggagcgccatgaacagcatggcggagatgtctttgcccagccggaaacggtgggcggcgcctccgaaggtccttttaacaagcgcaagcgccgccgccgcaataagaaaggcggcggttccgaagaccgccagcccatgcaggatgccgcttctctcaagcagttggattgtaagaaggtggcttcccgcgcctggaaaatgttcctggcggaagtgtctgaagaaggccttgccctgatggacgaccagacggcgcgtgaggcggcccgccgcgctttccgctgtgcggaattcttcatgatggaggaagcgcgccgcaagcatgcccagaaagcagctctccagcagcaggagaaaacttcttctccggaagaggaacgggattccgaagaggattccggcgaagaataattcctgtctgtgttgatgtttttgccctgcggcggatgccgcagggcgtttttgtatcctccgggcttattttccggagtttgaatggccgtgttttatccggtgcattggcagtcagcatgcgtcaccctttgcccccagggcattttttgagaatgggagagcgttggagacgcctgtatgaaagcgggctttatttcaggccgttccccgttcttgttccttctaaacctttttgcctctccatttcccgctcttgaggtaccaccatgccaggaagatcagggtaacgccgtaaacgtgttcggaaaaccagcagagagccacatccggcttgagcctgatgatgccgtaataaatgacggccgtgtaaacggccagggaaatcatttccatgatgaatcccgccctggtattgcctgtgccggatacggcattgaacaggatgaatgacggagccatgatcagtgtggaagaagccatcacatacacggaattgacgctggcggcaatcagggacggactatccgtgaaggcacggaggacggactccggaaacaggcacagtatgatgagcagggggatcaggatggcgtatgtcagtttgagagtcatgccgcaggttttgaacaggcagcgctgttctcccgctccaatctggttgctgatgagagctcctgccgtggtggcaaaagcgctgatcaccatgatcagcagggcggaaatattgcggacgatgttggtaacggccagcgggcgttcccccaaatgttcaatcgccaggaaaaaaataaaccagatggagacggaaataaaagattgcaccatggtccatccggaaatggacagcattcccttcagcagatgggggcggagtgtgaatgcccggcggaagccgtacttccgtttatccgccgtcatgcttgtgtagatgatgaaaaagagaagggagactgcttccgatacgctggaggcaatggccgcccctgctatgcctgcggcgggaaagccgcctttcccgaaaatgaggcagtaatttaacgcgacattgctcaggagcatgacaatggaattgaccgtcagaatcttcgtctgggtaatccccacgtaataggctcggaacatgacgcagaggaaagagaaaaagataccgtaggtgcgccagtgcaggtaatccgccgtggccccgtacacctgtggggattcaatgatgtcccgcaggatgatgggggaaaaatattgggatgcggcaaaaagggctaccgccaggaccagcatgaaataacagccctgaaccatggtgggggcaatcctgttgtaacggcgttccccgttgcggcgcgcaatgatgatttgtgcgccaaagccgaagccgaatgccagcatgaacatggccatgtaatacacgccgcccagagcgcatgctcccagcgccacgtctcccacgcgccccaggaagacggcatccgtcaggccgatcatatgctcaatgatcaggctgatcatgagggggtatgacatgagccatatcttttgataggaagtaaaagaaggattattcatagcgggggcagcctgcgggcatgatccgccaagggcaggcgctaaaggccaaatattcttgaattaaaatgttttcttgcaagaaagaaatgcgtttgcttccgcacatgtcatgaaaatgggggtaatgccccgggtcagctgagcggcagtctggtttccggataccgcaggggggatttggttggttgtttcatgaaggccagcacgaaagccaccatgcccacacggcccacaatcatgttgaacacgatgatccatttgccggcatcactgagttccggagtgacgttccatgaaaagcctaccgtggcgaaagagctgactacctcgaaaaacaggcgttccagactcaaccgcggttctgcaaaacacatgaccgtagtcatcatacctacccaggctccggccagaatgacggtgatgacggcccgttccaccacattgcgggcaatccggcgcttgtgcatgaccacgtctttcttgccctgtaagatgcgcgccacctccccgcaggaaacggcaaatgcggtggtatggactcctcccgtggtggaaccgggattgcctccgatgaacatgagagctcccagaaacagggcgtatggagcgctgttgagcgccatgtccgaaatgttgaatcctgctgtgcgggccgttgcattgaacaggctctcccacaaaatccagtaccacggatcggcagacgtgaacaggctgccgtcaattattttaatcaggaacaggatcagcccgccgccaagcaccagagcggcggtcatgcgtacgaccagccagctgtatgtggaccagtggcggctgacggtgttccgggcatcccagcccagtgcgactctggcccggcggacgatttccagatacatggcgaatcccaggctgccgcaaagcaccatgaccataatggtaatctggccgcccatattgtaggctacgcccggtgtggccaggttatccgcaaacaggctgaatcccgcattgcagaaaccggaaacggaatggaagacggcgtaccaccagagcgtgtctccctccagccccggaacatgtctccaggaaaaatagaggcctatggctcccagcgcttccactccgaacgtgacggcaataatattcttgatgaaccggtctacctgggcaatgccttcttcatccagcaggttgctgatggttaccttggaacgcaggctcaacccctggccaaccatcagggagacgaaataagtgaacgtcatgatgccgaaagctcccacttggaaaagcaccagcaaaatggtctgtccgtaattggtgaagtgttcatgaacattcagggggaccagccccgtgacgcagacggcgctggtgctgatgaaataggcgtccgtggcggaaaggacgatgccgtccttggtagctcccggcgacatgagaagagttcctcccagcgcaatgaaggcaatcagggtaagcaggaaaagaagggcgggacgaatgcgcgggaggtggaagcccctgttccggcgggcgatgcggaaaaaatattccttgaggttcagcagaggggcggctccgtagcagaggcagagcgcgcggaaaatgttctgaagctctattttggagataaaggtggaatggaaaaagtcgcctgccagcatgaccagaatcaccagccccagccccagttctacccaccgggggttgcggatggccctggcaagccatttttcccgcaaaatgccgatgacgcccgtgagctggcccagcaccaggaaggagagaatttcgcggaaatagcgcagggaaagctggtcttcatgaatttccccgaagccgttccaccacagcagccacatcaatgcggccagtgtgcacaggccgaaccccatttccatgacctcaaaacggttcaatagcggtttttcattcgtctcattcacaagcctgcaatggtgatgcctctgatgctggggggagactactgcatacggaaagatttgagaagcccttatatcgtttccaggcggccccggctgaaggcaggaaggcgccttgggaaaaaatttttttcatgtgaaggaaaatagttgccaatccggcgccgccgtgcataataagcctcgttcttaccaaaccatgtgcgctcgtggcggaattggtagacgcgctagattcaggttctagtgggggttcccccgtgaaggttcgagtcctttcgggcgcaccaaacaaggccctgcaagttaactgcttgcagggccttactggttttatgatgtattcgtgcattggctttgacgcaacgccggaagattggtgaaggggctggataaggattattgctccgttgttaaggaacgcctgtggttttcaggggagggggcgttgcctttttgggagtggatgcctgcgaattgttcatgcgccagcttcatgaacatacaggaggaacatttcctttcagcggtaatgcgttgtctgcgctcctggtcgtaaagtttctcgtagcgttcggcgcgtttcatttccctccagaggaagatgcccatcacggctgccacggaggcgccgttttgaacgtattcaagcaggggattgagttctgaagtcgccatgcaaacaaccgcaagggtgttggctaaaacgacacttgtagtaacggcagtctgggtcatggggctggaaaggtcatgtttcgaaacttctgcgcgcttcggaaatgcttccgaattgatggagctgcaaatgcggcggatctgtaaaggatttccatgttcctccccactccaggccgtcaatttttgcgtaaagtttgccaagagtggtgtaaagagggtgattgggcaggtagttgcggtcctggaaaattccaaaatcccaggccaggccgaagttgtgccagctctggccgccgcgggcattcgttactttagggcgttgcctgtagaggtcattctgttcggcatacgtgcgcgttccgcagataatttttgcttcatatccctggttgacggcttcattccaggccagtttgaaccactgccgggcggctttttgcgcttccggaagaagggtggagatgttccgttcggtgcgttcgtcaaagcatccggtctccattttgtaccggtcggcgtccgtgctccagcgttccgttccgttccgcgtgccgttgccgggaatgccgtcaatggctccgtgatagtacccggccaggcgcaagagcctttgccagtagaaggtatctttctgcaggtcggaaatgctgtcagccattgtcgtggttttcctgttcctttttccggtctttggtgacaatgccgatgaggcctgccgccgccatgcctgcggcgataatctggtcggcaagagcttgttcgatagtggccccgcaggctgtggccagggcaaggaggcccagccatgtggaacgttccgtcagtcgattgagaatgtatttgaacatgtgatggtcggttggtattgaaaagtccctctgtgggagaagggggaacccgcctttccgggaatgccaaaggatggggaaaaggtttttccgaatcctctccgccaatggggaaagggggctatcggttctccgcacaagttgctctgaggttgctgccgcgatttgcaaagattccgcggatacttttattgcttgccctaatcggcaaaatccgtcacaggaaacgatacttgtcttttattcatgaagataccataatgcgccaaccaacgccattatgaataaccgtttaacatcgtttattatccgcagatttctaccatttctccgatatgaatatctcagggaattggaagcgtacctcagaaaagaggtaaccggttttcctactgtaattcctcctgaacctttttccgaccgccaacagctggaggcataccgcagggctctcgggcaaactattatttccggcatttgttaccggatgtacggccttaaaaaggagacggacaggatttaccgtattttccaccttttgcaaacgtgcagttccggtgaagctactgcggatttgcgggaatacgccgaatcgttgggcgtttccgtcaacagagatttttccaatggaattgaactcgccgttctgcattttctggacggcaatatcagcttgctcaggcagattgaggaattgcattccattaaaaagaggaaatcgtatcgtattcttccccccatgaaagacgcgcttccttttcccatgattacggagaaagaaagggagaaggaaaaagaaggctgccgtcaatatctgtcccgaattttgtcgcagaaggggatgactgacgtatgcgttatcagctgtgaccggatttcctctgattactggtttaccatcaaacgggggcattatcaggaaaccgttgatgaggttgacacgtcggccaaagagatagtcagcagcatacgtactcccgggaatacggacattgtcatctacagggggagttcgaaatgcctgtacatcaatttacaggtcagcgccagaatccaatggatgatgcgggcctatgccgtcattgctggccgcatgctgttcggctcggatatttgggaattaaggaaccgctacaccctgagcgtgtttaataagaagtccatcgccgacattgaggtgttcaataatattccgggtctgcgaagggttgctgtttataagcttgtcatgtccaggcctctccatgcaaggaagaggacggagaaagaggtgttgatgaggggatttacaggcacttacaaaagcctttccgagcttggcgatgaagacggccccctgattgtcgtccccagcgggttccatgtggacaaggcgtttttttattttgagtttgaagaaggagacccgaaaaccgtttctttaactcccgattccaatggcctggaattggaaagcgagcaatacaggctcattgatatgtattttgaacaggccggttttgaccagttgtacaacaggattcatggagcttaattacggcaatatcctcgatatcattattgaaagcgagagcctggagtctcccgattggatatggaaagccagggtgggcggggatttttatccggggcactgggtatgcggctgtaaacttgccggaatatccggtgactattacaaccccgacgatatcgacaatcctttgaaagtggtggctctgcctccggaagaagagcctttctacgagtacggagggaaccccggggaagaagaccgcaggcgtttttatgtattgaaggaaccctgctgccgggagcctgttgagaggagcgagcttttcgtgcatgccctggtgttcaggaagattgctttgaatattgcccgttcctgcggaaagacggagagggaaatcagcggaacggagctgattccggagtgcctgatcaggctttttgattttcccgtaaccgcctattttgcttttgcttttgatgagcggctggtttccagatgcctgcgcgtcatccggcaggcacagccggaaaggccctttcttctcttggtgatggggaagcgttggcggactgccgccatggaggctgcaattgttgagaagtacaaaggcatcgttgtttccattcccgacgtcatggtgacgacgaaagatggatttgcctgggcgtacggctattcctgggagtggctcagggagggcatgcctgttcatgcgcgcacgggggaaagtcttccaaccggagccatgtgggaggatctgtggatttccgtgaccgatgagcgggaaatagttttttcctgttcacggggcggtagggaagtgaaggaattcatgaggttttcctatcgggaggaaaaacgttttttcagcagacaacgggcggctgcgggacaggattccacgaagccggcttataagatgctgtttttgtacgtaatgaatccggataaagcctgtttggacaaggaacttttgaaaagggccgggattgggaatgaggcggaagccaggtcggatttgagaaaagttcttgtggaaaggctgccccagctggcggaaagggacccgtttgccaagaaaagggagaagtcaaggcagggcatgtaccgccggttccaggtagttccctgtaaatcttatatccgtcctttggaactgatgctttcgcttgaaaggaagccggaaaggcacaggtaggagggcaggcggttatagaccctccccatgagcggctagctggatgaacttattcgtccagctagccgctttcttttgataaatatatgaatttcaaataataatgatgatgcggatgtggggcatttttcgctagctggataagtccgcacagggttggtgaatatgcacgaaaagcaatcaccaacattgtcggaaaccgtggaaaaccacgccttatatctcgctcagcgcctccgatcaaaagcaaaatccatcgggtttcagatacctgaggaagaatatctggatgtcctccaacggttcagaatccgatgctgggaaatttgctgccgttaccggaaaagtgggggagccggcataaaaacatacctggtcaatgcaaccgtttttgagccggaacgctatttgcgcgagaggaaccggaagaagaggctgctgctgcgggaagcccgtccgcttgaatatgaaaatggccgggaaattgacgctgacgagcattcggacttcctttccgggctgatgttccgggaagacttcgagcgggaaatggaatccctggagccgcaggaaagggagctggttgaggcattgattgacgctgaagggaatttgtcacgggcggccagaagcattcatctggaggaaagcagggcgcgccgcctccggaaacggctccgggaagaaaaattcacttttttaagaaatgggcggcagatttccagaaacgcggcaagcaatcatagtgaaggcagatgaacgttctttcttttctggcgcatgccctgtccgggacagctccgtgaagagccgtttattcactttatcaagaaccgtaagcatttgaaaaacaaaatgatgaatacagcaaaaacatgcgggaattccagttcccagcctcagcgttcggaaaattccctttcctgtcccgtggcagatgccgcggcaggcccctcccatgaacccctgcttcccgtaggcacggttaccggagatatcaggaacaacgacattgtccttccccgcttgaacattgttcaaagcgtaggcgccctttccgggatattttcccccggcagcatcatccttaacagggaagtcgtgctttccgacggaagcgttccactggagctttccgtgctttccgcgcgcaagcagtttattgaaaaactcccctttgattccgtagagaagccggccgtcttcaattctctggaagaagtaagagccgccggcggcacggtcggcagagagccgggaaaccggccttctttcgctcccgttctgcatgtgcaggcacttttcaaggctccggagggcgtggattatccctttcccctggagtacgaaagagaggctttcgggctggctgcctggtccctgcgcggcatggcttattaccttgcggggcgcgacatcctcacggcttccagatttgccctgaggaatgaagtattcgccggcaggtggaagcttacgaccaggctcaggaggctggaacataatggcattttcattcccgtgctgcgcagtgcgggccgcagtacaccggagttctcctcctttatcaggagcattggttaaatttcttaccctccgcaacgaagagcagcgctcatgagcagtccaatcaggagattattcgtcaacgggttcccgagcctctacggaggagcgggaacggaacttcaccaccagatcattgtctggcgcaagatgggcgtggaagtccatctcatcccgtcctgggattatcacggggagcctctttacaacgaaatggtttccctgggcgtcatcatgcacgcccccgcggactggtcggccgtccaacccggcgaccccgtgctcggtttctgcaatgccggcttcctcaacgccttgccggaaatacgcaggcatacgaaacgcacagttttcatcaactgcatgacgtggcttttccccagggaaaaggaggccatgcaaaagggggaaatcgccatgttcctctatcagaatgaagccgtccgccaggaagccatgcccgtgctgcgcaagctcaacggcgacccgcaagtgcagttcctgaccttcaggccctatttccatgcggaatcctttccctttatccgggaacgcgatgaggatttcttcggctgcgggcgcatctcccgccaggatgccgacaagttcgcggccaacaccctgcatatctacggcgcatttgaatcccccgtggagaagcgcggccttttcctcggttttgacaagaggagcgaagccaagataggccggcccttcgactggattcggattgcccgcaatcaaagggaagtttcccagcaggctttttacaggcacagccggatcatcctccagccgacggatacgacggagaactggccccgcatcggctttgaggcgatggccagcggcagcgtgctcattgtggacaaccggggcgggtggcggcagatggtggagcacggcaaaacaggatggctgtgcagcaacgaaagggatttcatctactacgcttccaaaatggcctgtgaaccgaatcttcgcgacgacatggcggaggcggcccgggcgcgcggcctggagctgggcgggctggatgtttccctggagagctggaaggaagtgctggaggcgatggcaagactcccggaatgaacatggaacggaaaaccggccttatgaataaaaaatatgtttccccgtgtttcctgcccggcatgcggctgggcaacatcatgttcacgctggcggccgcctgtgcccacgcccgtaccgtaggggtggagtgtcgggtgccctgggcttacaatgacgcttccctgatgctgcgctcccggctcggcggctgggtgctcccttctacgccgtgcggcaccaatgaacctccatcctggcaggaaccttccttttcctattgtccggttccctcccgcatccggacgggcgggcttcgcggctacttccagagcgcgcggtattttgaagggcaggaagcgttcatccgggcgcttttcgcgcctctcaccgcggagaaggagcccggcgccgttggcattcacatccggcttggggactacaggcgcctccgtgacaagcaccgcattctggaccctggtttcctgcggagggccgcagggcatttatcatccgggaagaaccgtctggtgctgttcagcgatgagccggacgaggcggcggagatgcttgcgcgcgtgccggcattcggacgctttgcgctggaaatcgaccgcggcgctccgtgcgaatccctccgccgcatgacggcgatggaggaactcgtcatgtcgtgttcttccttttcctggtggggcgcgtggctgggaaatacccggaaggtcatcgttccgcgcgactggtttgtcggcggtgtggaagactaccgggatatttacctgccccattgggtaacactgtaattccgccacgaacccatacccgtaaaacaatgaatacgagaaccgttacaagcctctgggtgggaggggaacttcccctgatgtccgttctgtgcatcaaatcgttcctggaccatggccatgctttccagcttttcagctaccggaattacgacaatattcccgcaggaacgcttgtgcgcgatgcgcgggatattctcccggaggaggcgattttccatgattcccacaatagcctggcaccgttttccgattggttccgcatgaaattcctttcacaggaaggcggcttctgggtggatatggacgtcatctgcctgggtgatgaacttcctgcctctcctctctggttctgcagggagtgggcggaggtggtggccgtaggcgccatggcctttcctcccggtcattccgttcccgcaaccctgtgccgccttgctgaggagccggcgctccgcgttccctgggactctccggaagaagtccgggccaaggaggaactgctccgccgtgtgccggatgtcgccgatcgccggcgccaggtgccatggggattttgcggccccaccgggatgacgcgcgcgttgcgccactgcggcctgtttgaccgggccgctccgtcttcccacatgtatccggtcccctggacgagatggcgcgactgctacaacggcaacatacgccttgccgggccggaattgtccaatgcctggtgcgtccacctctggggagagatggccaggcgggagccggacgcctgggaaaatatgagccgcagcagcatggcaggcgaactgctggacaggcatctgccgggccacgcctggaagcctgcccccgggccgcgtaaaaaagtgaatgtcctggtgggcatctgcagctgcacaggcgcggcgaaccgccgcaaggcgtgccgggagacctggctttcccatcctcaggagggtgtggaatgcagatttttcctggggcggcgcactcctttgcccaatgagcccgatgtagtggccctttgggtggaggacgattacaggcacctgcccgccaaggggctcgccttttatcaatatgccctggaacattatgactttgactggcttttcaagtgcgacgacgatacctggttggcgcttgaccgcctggaaagcctctgcgacggccgctatgaccttgtgggcgacatgtccctggcggacagggggttccccagcggcggagcgggctacctgatgagccgggcgcttgtggagggtattgtggcgcacggcggccgggttcccgccgtcggggcggaggacgtcatcttcggccggctggcgcgggaactgggcgcgcgcgtccatgccacgccgcgcctcttcctcagccatgctccggcgccccaccgcctgaatgaccaggtgagcgcccattggtgctctccgggcaggatgcacggcattgaggcccttttccatgatgagccggtggccgtttatgacgccgtgcatccccattggagggacgaactcctgttttttgcccggggccgtttcatgcgcggcgccggcggctgcgccgggcgctatgtcctgcaggatgggctgctcacgctgttctgggatgactgggctccggaagctctggaaaaaaacggcagcggattttcccgcggtccgttctccctgacccccgtcgccggcagccggcagcttccttttccggagtccgtgtcctgacgggcatggcctccattccctgttcttcccatccgtccgccgtggtgcggcacggggaaggaagatgaaccaatccaatcggcgcctttcgcgccgcaataaaacaacaatcatcacacaatgtttaccaacgatcaaccaaacgacgacccctcgttgaacaggggttccgccaacaagatgaactccaaccccgccgccgggcttcccgatgcggccagccagcccggcgcgccgagcgccgcagcgcccctccatgccatgtccacacccattcagccctacggcgcggattccgttatttatgagaaatccgacaacttcgttcagacgtctgccggtgccgacgtcttcatgaccccggtcaacgacaccttcagcgtcccggaaggcggggccacggccgtggccagcctgacggtggacgactggggcaagctgactatttccggcccgggcggcaccttcgaactggacctgacccctgacgccgatgaacccggagaactgggaggccaccaggaatggaccaaatcaggctcctttgaactatccgaaggaacgtacgccctctccatcacgcaccagaacatcgacataccgcacaacgaatacaaccaatccgtatgccgctattccgtgacggtgactgcccatggaagctccggcggttcctccagctcctccagcagctcctcttcggacatgccgccggaagaaaaggaaatctgctgccgttgcggtacgtgcacggacgcggaaggcaacgaatacaccattgcggcggaaaaactgccgggtgaccccggcgtggaaatctgcatgtcccaggccgaattcctggccaggggaggggcttcggctccgtctcccgcggccttcagcctccgttccgcggaaaacgcccgtgaaacggcggaagcctgcggcggcctgaaatacgtgagcccgtgggcctggcgcgcccatctggacgaaacgtccggcctcatcaccatcgtgccgccggtgggcgccgcgctttacttcaacgtgcaggccggttccgatacggccctgcctgcgggcatctcccgcaagcgcgacttcagggtgcagctgctggatgaaactctggctcctgccgcttccggcgcccccgcctacctttccctggtggacgcggacgggcagaaaatccgcttctccgcggaaaccggcgctgtggtcggcatgacctccgcctccggcagggttcttctggcggaagactacttccggaatgtgagcaatacgtatgaccatgagggcagcctggtaagcagctacagcgccgcggaggggctgatgcgcacccggaccggagcgggcggagaactcgtcctggaatggtacgctcccgccgccgtcacggctctggccgacggaacatacgaagtaacgggagaaccctataaaacctcctcctacctgtcctcggaagaaaacggcgtgcggaccaccgtcatcacgcgccagcagcgcggactgccggcccacaccatcacccgtacggaagaacccggcagagtcagcatcgccaaaggccagggggacgacaccatcatccgcaccattgaaaccaaccgcctctacggaggcctctcggaacgcattgagaccgtcaggggcatccacgatgccgagcctgtttcctgcagccgcagcgtcaggcaatacacggacggcggctggctgctggtaagcgaaacggaagccttcaacacgccgctggcgcggacgacctcctacgaatacaacagccagtaccgcgtctcccggatcaaccgcccggacggcggctacacgcgctatgaatacgacggcgaaggacgggtcacgcttgaggcggcgccctgggccggcggcggagaacaggtaacccggaccgaatacgccggcctgcgcttctacgacaaccgtccggcgcgtgtcgccgaattccgggtgctgtccgacggcacggaaatcgaactgacggccgccgcttacgcctatgagcgctctcccctcatggaacgggtgaccaaaaccgtgactgccgccggttccggccaggaacagacaagcgtggaagaaacgtatggagaagccgccgcctatccctatgccgccgggcaaaccaaattcacccgggacattgccggcgtggaaaccttctatgactatgaggcggccgtggaacacggcgccgcgcacaaaaagacggccgttaccaaggtcggcggcgaactggcggccggacagagccgcaagacggaatcgttccttgccgccaacgacacggtgcttgttgaacaggaaagcgtctgggatggcgacaactggctgctgctctcaagcggcgcccatgaatacgacgaagaaggccgccgcacgaaaaccacccggggcaacggccgcgtcacctccacgtcctggatgtgctgcggcaagctctcggaaacggacgaagacggaatcctgacgtcgtacggctacaacagcgcccaccagctggtggaaaccatccgttcggaaatcagcgacggagacacggtcgtaaccccggaaaccatcaccacctacacccgggacgccgccgggcgcgtcctgcagacacgccgggacaggggagccatgaccacgacggaaagcgtggaatacgacaagctcggccgtatcgtcaggcaaaccgatgtgctgggtcgcgtgacggcgacagcctacagcgaaaacggcctgacggaaaccgtcacgacgcccgccggcgccaccctcgtcaccgaacgtcaccccgacggctccgtactccatgaatacggcacgggacagcgcgaacgctaccatgtctatgacatcgaccataactgcctgagggaaaccgttaccctggccgaccagaccaccatcctctcccggaccctggtcaacggcttcggacaaagcgtcgtgcaagtgacgcccgcgactgccgggttcctgtatgaccgttccgaatacgatgaacaggggctcctcatccgcacatggagagatacgggaacgcaggagggggccgtcgccatggcgcccacgctctacgaatacgacgccttcggcaacatgaccagggaaacgctcgccctggcggagcagcccgcaccggacaacagccccatccgggaatatgccttcagcgtggaaaacgcggaggacggcgtctatctggtcacgacgcaaacccgctaccatgcagatggacatccgctcgtctccgtacggaagcggctcctgtccgaactctccggagttctggaaacaaaaacaataagtatcgacgaacgcggcttgacttcggcggaatggacggagtatgctgaaaatacgaaaagaatccaaaagagcgttatcccctcttccagcgtcacggctcaaacggtggcggcggacggcctgatgctctcgcagcagaaccacgcgggcatcacggaaacggccgcccgcgcctatacggccgcgggcatgaccctgacccgcacggacggccggggcaacacaacgacgatccggaccgacctggccggacgcgccgtcagcgtgacggacgccgccggaaatgagaccgtcacgcagtacgacgcccgctttgacctggccgccgtggtgacggacgcgctgggaaatacggtgtgcgccggatacgacgccagaggccggaaaacggccgaatgggggacggggacgcagcccctgctcctgggctatgacgaagccgaccgcctggtgagcctgaccaccttccgcgcggcgcaggaaggagacgtcgcggaagaccccactggccgcgcggatggagacgtcaccacctggagctatgacgacgccacggggctggaaacgcgcaaaacgtatgccgacggaacgcacgtggacaaaacttgggacgccttcaacaggcttgccacggaaacaaacgcccgcggcatcgtgaagacctgcacttacgaacaggcccgcgggctgctggtgggaatcagctactcggacgccacgcccggccagagcttcgtctacgatcacctcggtcaattgacgcaaatcactgatgctgccggaacgcgaaccttcgcctacaatctctacggagaaccggaaaccgacagccttgcggcaaacggcctctcctggcaggtctccgaactctatgacgggctcggccgtccggcggggtatgaattaagcgcagacggccgccgcgtccagcaggcgcgcctgtcctatgacggcaaaggccgcctctccgccctcgcggcggaaggcatggaaacgcccttctcctggacttactgcgaacagggagggcttgtggaacaactcgcctaccccaacggcatgacccgggtcaacacctatgaaaacagccgcgacctcctctccgtcatcgactaccggaggcccggaagcgccaacccgccggcaaggcacgaatacgactacgacgcgctgggccgtccgacccggcgcagggacacgtggaacacggcggcgcccaaaacgacgcgtttgttcacctacaacagccgcggcgaactgatcggagaccagctcaggcccggagggcgcttcggctaccagtacgacaacatcggcaaccggaaggaagccttcgaattcggcaacacgacggactatgaaaccgatgaactcaaccggtacgcgggcatcgccggaaatggcgcggcggcattcgtcccccaatacgacgccgacggcaaccagacgctggtgaaaacttccacgggcatctggacagtcacctacaacgcggaaaaccggcccgtgaaattcgaaagcgaagacggcgggacaaccgtggaatgcgcctacgactccatgggcaggagattcgagaaaaaagtgacggtcggagggacaacgggcttccacgcgcgctacctctaccgggactacctgcaggtggcggagtgcgacttgaccggggaaacgccgaagcttgtgcgcagctacctctgggacccctcggaacctgaggccacgcgcgtcctggccatgacgcgctgggaggcgaacgggacgcaggtgaaggagcatctctactgcatgcacgacgcgatgaagaacgtcacctccctcttcggggaagcgcgcggacgccgcgccctgtacgaataccgtccgtacggagggctggtcacgtcggaaggcaacatggcggaagagaacaaattccgcttctccagcgaatacatggacgacgagctcggcctcatctactacaactaccgtcatctcaatccgcgcgacggcaggtggatcagcagggatcccatcatggaacaaggagggtggaatttattcgcctttgtaggaaatttacctgtatgggtaattgactattgtgggcttgaagttaaagaagaatcacgtccttttgcaatgaggccaaatcctgatagcaatttagggtatacagtaataaaagatgcttcattcatggataaagatttggaaatagaatatgattataaaaaagaaaaaaataaatgtagagtatttgtaaaaaatattaaagaacccgttttggtaatacttgagtattggccttctgaagatgaaaagattgtaggatattctaaaaaaggagttttggctattattggtcatgaaaaaagaagattgcaggtgtatcaaaaagcagatgaaacatatatcaagcttgtaataaataatgtgaaaatattatatgctgaagacgagtcgcgagaaaaggctgaaaaaaatttgaataactatattcagaaatattatgatagtgctaaggatttccttcttagatatgttagagaacaacaaaaattaattacaccggaagctaatgaatggaatttgatacgggaaaaattaaataatgaagtgataggtattaaatggacacacaaagtacctgatccaaagccggctcctatgcctatgctccctgagggacttggaagaacaggaaattagcagtgtaagtaatataactatcccgcagtttatcagagactgcgggatagttgtgaaatattaaaaatataataaatactaataacaataatgaaaacaataactttctatacgaatttcttgctcagatcgacaaagttggcatgtttgttggcatgtgcagccttgtgttgtgtttccagcgcgcaggaaattgattttcaagataaggtttataagccctatattatagcatataacaataggaaatatcaattctgtcctgttgatttaaatatcttgaaatgtgaaaaaattcgctgacatatgcgaatctttttttcaatttcatgttttctttagcgcctggccggacattaagacgccatctcgaaaatcattcattatctgctttgatgatattgcttttttcagcaattcctctatatttatgatagaagaccttgtgatttatgttgatagaaagacaagtaaaatctataagcgcgatccaaaaaatattataaaatatcaatgcaacagacaggaagtgtccctaattgaaaaaatgagaaaactggacccgcctgatgatgttgtggctggctggggaaggtattccaattttggcccaagcaatatgcagcgaacagaggataaaaaatttgtcatatgggactttgctggaagcagttcccgggttactgaaactcttttcggacaaaaatcgaaaatcaattaaaatgtataaataaaaattgactctggtgttgtagaagatctgataactatcagtacgacaacatcggcaaccggaaggaagccttcgaattcggtaacacgacggactatgaaaccgatgaactcaaccggtacgcgggcatcgccggaaatggcgcagcggcattcgttccccaatacgacgccgacggcaaccagacgctggtgaaaacttccaccggcatctggacagtcacctacaacgccgaaaaccggcccgtgaaatttgaaagcgaggacggcgggacaaccgtggaatgcgcctacgactccatgggcaggagattcgagaaaaaagtgacggttggagggacaacgggcttccacgcgcgctacctctaccgtgactacctgcaggtggcggagtgcgacttgaccggggaaacgccggtagttgtgcgcagttacctctgggacccctcggaacctgaggccacgcgcgtcctggccatgacgcgctgggaagcgaacgggacgcaggtgaaggaacatctctactgcatgcacgacgcgatgaagaacgtcacctccctcttcggggaagcgcgcggacgccgcgccctgtatgaataccggccgtacggaggtctgatcacgtcggaaggcaacatggcggaagagaacaaattccgcttctcgagcgaatacatggatggcgaactggggctggtctactacaactaccggcatctcaatcctcttgacggcaggtggatcagccgcgatcccatcatggaacagggtggctggaatttgttcgcctttgttaataataatggtatagttttctctgataagaaaggggaaaattataatccatttactccgggtatgatgaatcctcctagtacttacgattctccagtatatactccttctccaaagaaggtatccatatccattacttattctgccatatgtcaggatgtgggtatatgggattggttaattaatatatcattagctgataaaattactaaaacgccatctgattttgatccgaattcggaatgtaattcttgtcaatgcattaagaaattgacggttatcatgcatggaactccaaatgaatatgtatctggagttagtgctcagtggggagatactcatttatttgagggtgataaatttactgaaatatcagatatgttcaaaaatattaaattttgttcatcatgtgagctggaattgagaagttgtcatcttggagaatatccttttttaaagcaacgtctggaaaataacacaaaatgtaaagtaaccgtatatcaaggcggtgtaaatgcgtttttccctcgtttaaaatgattaaaaaaataaagaaatggttttgtaccatcattgcggcatttgcggttatttacgccatcaatgtcatatatgccagttggtctgtatttaagacattgaatggcaacaatgatgacgaaatgagatattatgaggtaaccatgtatccaaacagcggatatgaaggaatatatgtttatgcaaagacaagtttgatatattcatttataccacaagatttggtttttgttaaaaaaagagatggggaaatttccatatggtatggaggacgcttattcaagagagggagagatatttatatgcaattggaggcgactaattctgagaaatacagaaaaatggttgaagaaagatattggatgagtaatgaaaaactggaaaaatggataagagatcgaggttttataaaaattaagtaattatcttgaatttatcttaaatgatttattatttatgtaattgataaataaaatttcaaaagtgaaaatattcagagatttaactattgaaacagaaagacgataaaaaatatttgcacacctcttccgggatttttctggaagaggtgttactggtttgtaccacatgtttcaacagattcgcaacaaaaacaaatgcctgctgtatcgtcgcgacctgcacctacgaacaaatccgtgggttgctggcgggaatcggctattatgttgccacgcccgattagagttttacatacaactatctcagtaattgacacagattgaaaatgctagaagcgaccgcctacacaaccggcccgctcaaccaatacagcgccatcgagcgcggagaagaagccgcctttgaatcggtttacgacgcggacggaaatcagacattgatcaggacatccacaggaatcgggtaagtctcttacaacgcggaaaaccgcccggtgcgcttcgtcaatgaaagcgccaataccgtggtggaatgcgcctacgactccatgggtaggcggcacacccgcaaagtgagcgtcaacgggacggtgagcaactacctgcgctacatgtaccgcggctacatgcaaatagccgccatagatgccgtcagcggagccttccgatggttcctgttctgggacccgacgcagcctgaggcgacgcgcccgctggccatccgcaaggacggcacctggtacgcctacgggtgggatctgaccaggaacgtcacggaagtcttcgggaaagccggctacctgcgtacggcctacacctacacgccctacggagaagtcaccgccgaaggggacgtcacccagcccatccagtggagcagcgaatacagcgatgatgagcttgggctggtctactacaactaccggcatctcaatccgcacgacggaaggtggatcagcagggatcccatcgcggaacaaggcgggtggaatttgttcgcctttgttaagaataatggtgtaaaaagcattgacttattgggtttgctggcatttataagttgcgctcgtttttctgatttaagcatggtctgcctgatttccattttggatggactctgcgtttgtcccgaatgcaaaaagatagcggataaaatgtataaggcaaaatctctcgatacgcttttgaaaaaaggaaatgaactggtaaaatgcgcggaaaatcaaaaaaatgatacgcctgttacgcttgaaataatcggacccatatttacgaatttcggggaaaacgcagggcgtggacctatacctgcagataaaccgtacaggatccttccaaaaaaagatggtggccccaagaataagggtggtaattaccatagaggaaccccttcgccaaccgacttaaataaaggaacgccgggtacaatttatgattcgaggtatgttaatgataggacagctatacggattcatgaattggggctttccaaagggtgcattaccatagggagcagatatgtcgactctgaaggcaaagaaattccgttggttagtaaaaatgcgggggaaggctatattgaacagttaatgaaggagcataatgaatgtggaggattttatttggaaataaaggaagtcggagacgaatataaacctgaggagttgatcaatgttaagaacagctatgatggtgcggtctatactccaaatacggctgcaacgattttgaaaattccaattatgtaatttgtggtagaaaaatcagattaaccgaattccatgtctcctgagaaaatgattctgacagacaggcaatattctgaataaaacaggttccaaacaaaatgtggcgtcatgtggtgatgacgccacatttttatggatcaaatagtcgtgttcatattcactggcaatttgcagagacacaccgcataccggaatacagccgaaaatcctgaaagacgatgctgtatcaggtttgtcagacagctattccatctttgtccgtgttctatattttagatttttgaaaacatttttggcatttgctgttttgtccattattggagaatgaatagcaacagtatactattggaacatgccgtaaaaggatattgactttgatgttattatggatatagggagggatatgagcttgaaaagaatgtgggttttatccttgtttccggttgcattgtttccatcctgccgccaggggatgactacggtggcacagcctctgaaaccggtatttgtacacgtagttaatcctcctctggagtatccggaatttcccgaatcaagagaaaaaataaaaaaattgtcacaacagcagaggcagcagttggcgggctatatcgttcattctgcgaattgggagcaaatgactaggaaagaatttgaattgatccgcagcggacggggccaggaaggtttgtctatggtgcactgggattcagatagttattttaacaggatgactgttccttatatccgttcgtcgagtaaggataaagatattttatcccttcttcagaacaatgaagacggagaagttattttgagcagagcgaatctttttgaactggtagcggaaaattatatagaacattatcctgatgataagaacggatgggattttttatggttttttatgaatatggaggaagatgaaattccttttggtagtataatcaaagaaacgattatcaaaaggaatctcgatcgattcgcctatgggaagaaaatactggatatgataggcgattcctctatcagaaagaatgatggacgctgcctttagttttggcgggactacctgcaggtggcggaatgcgacttgaccggggaaacgccgaagcttgtgcgcagctacctctgggacccctcggaaccggaagccacgcgcgtcctggccatgacgcgctgggaagcgaacgggacgcaggtgaaggaacatctctactgcatgcacgacgcgatgaagaacgtcacttccctcttcggggaagcgcgcggacgccgcgccctgtacgaataccgtccgtacggagggctggtcacgtcggaaggcaacatggcgcaagagaacaaattccgcttctcgtgcgaatacatggacgacgagctcggcctcatctactacaactaccgtcatctcaatccgcgcgacggcaggtggatcagcagggatcccatcatggaacagggtggctggaatttgttcgcgttcgtaaataataatggtatcatcaattttgatttagtaggtttaatagatggaggaatggggggtattattaatgggacatatggatcttctccttttaacgtatcttataaatcaaatcctaattattccccttctaataatggaaagaataatgttggctttccaattaaaggaaatgttagtataaaagtagagaatataattgaaaaaagtaatcctcttgttttcgttgttgcagttgaggttgaaaggactggcgcattaagagtggattatgataaaatagtacagaaattagaattgagtggtttttcaagagaagaagcaagtaaggttcgagattccattaaacttgaatttagaaagaaacagactattttaggtaaagctattacagaattaattttaaatcaaaggaaattaaatggatttgttgacaaaaagtcgaatccatcaaaaactaatccgaaagttactgttgctggaaaaattatgaaacatggaggacgagggataattctgttttctgctggcatagaaatatatacaatatggaatactcctatcgatcaaagggaaagagcgattttgcagtctggtggccgctttggtgggggtattttaggaggggcagcttcgggggcggttttaggttcatatggatttaatgctgttacagtagctataggagcgttccttggtgcagtagcaggatcggaaacaggagaatggataattaataaaatatgtaaatgaaatggacaaaaatttgattaataaaattaaaaacaaaaaaatagattatattgttgagtggtgggaggacgatagtctagatattgatagtaatcagcacattcttttttcacttgaaaacgaagatattgatattattgtaacagagaaaaatattgatgaaattaattttattttggaaaaatttaatgtgaatatatctatggaatttcatgttaacttttttgatcgtattatctatccaatatctagatatggagaaaaatattatgaatataaatatggatgtatgctgaataaaattttaaaatttataggtatttgctgtttgcaaaaaaggaagtctctttaaatttatatttaatattttttcaattggcattatttttttgaaaattaatgatattggttagagctgaatgaacagtgaagaaaatacataggataataatttttcatcttaatgaataacataactaaatagggattcttttgggcacccggtaagctacacttgccgggtgtctcttatcggatttttatctttattacaaagtgtatatatacgaaatatactgtaatctgctgacgggaatcggctattatgtcgccccgcccgattagagctttacatacaaccatctcggtaattgacacaggttgaggatgctagaagcgaccgcctacacaaccggcccgctcaaccaatacaccgccatcaaacgcggagaagaagccgcctttgagccggttcacgacacggacggcaatcagacattgatcaggacatccaccggcatctggcaagtcgcctacaacgcggaaaaccgcccggtgcgcttcgtcaatgaaagcgctaaaaccgtgaaggaatgcacctacgactacatgggcaagcggcacatccgcaaagtgagcgtccgatggttcctgttctgggacccgacgcagcctgaggctgcgcgcccgctggccatccgcaaagacggcacctggtacgcctacgggtgggatctgaccaggaacgtcacggaaatcttcgggaaagccggttacctgcggacggtctatacctacacgccttacggagaagtcgccgccgaaggggacgtcacccagcccatccagtggagcagcgaatacaacgatgaagaactggggttggtctactacaactaccggcatctcaatccgcacgacggaaggtggatcagccgcgatcccatcaaggaagaaggcggctggaatttgttcgcatatgttaaaaattaccctatctttttaaaagattatgttgggctaatttcatggggggcaaaaaaaatagctcctgatccgcatcctgatcttcctaagtataagtatagtattgatttttggaggatagggaatatgactcttgggtatccggaactctatactgctttaataggaacaagggttgattcttctttggcatatgaaatgttcattaaatatctttcaaagacaggtggcgagtaaaaatagatcctcaatatattatagatctcgagagtggcgaatcagatggtctccaagataatattaatttattggcaagattggctatatcgtatgcgatagaacataaatgttttgagaaaaattatatctggattcctggtaacttcttcaaacaagatccagtgaaggaaattatattttaggaagatattacatgacgatgactgctacagtaaattcagattgttccgtagattatactgcatatattagcgatatttatgatttagatcataatagttggctgcaaacgcgttttgccgccttagaaaaatacggttatgctgctccttttaacgtgagaggaaatatttctggaacatatagaaagtataaagaatgatgaaagaaatattgtttattgttttgactttattgacaaattttatttggttcacattttatcttgtgtacatcgggaaattcccgttggtaaaaatacttgtatgttctttaattgattttattgtcataatattatggaacgggggtgaatattttttgcagcatatcatatatgtgattttttgttcaatccttctcggaagtggatttgcaggatttattgagtacataaagaatttatataaaaattacaggaaaggtaatttatcatttaagtcaatttttgttattttattatacgtgtggctatgcgctatctatattgggatggctcaaaattaattttataaataaaagaatggttttttgatgttgtataatattcgttctagcctcttcttttattgtttgtgttttaataaaattttaatgaattgataaaacaaataattaaattcaaacctctcctgtcctagtggtgggagaggtttttattttttgaaataaacatagtaagcttcggctacagggaaggcggccgcattgccacggccaggttcctgcaggggagcgcgccccagacattcacctagcaatacatggatagaaactttcgttcattctgtaaaaaggctttgaaagtctatggttattctaatgccccaaaaactcaggacataaaggaagatgattattattcatcaaaagtgtgggaaaaattcaacgggaacttgtaaaatattggaatgatgcagaatactcttgcgacactatttttattttctataataactctagacaaatttcatagtaagcattctatttgccaatgaatgggaacaggaagcgaagggatctgtttcaacaagataaaaaaataattccgtaaaatatgatgatatcaaaaaatgttgtttttctatgtagcgcattgctttgctcctgctcggaagatgttgatttgtatcaatccgatttaaataatcattccgttaaaacaaacaggaatggtttatataggtgcccaccggaagagttatgtaaaaaataccctcttaaaaaatattcctggaaagaaaagaaaacaatagccaagtcttttgttattgggacaacaactcaacaagaagtaatagatattttaggagttggtatagtaggaagtgataatcctcccgtcatagatagtttgggttatcgttgtaacaagagcgatccggagtatcctggtgacgaatggttaaaatttcttgaatttaaatttaatgaagaagggaaacttgttaattattatgaagtaaaagtaccctatcctgttcctcattaatatttttgttatttataccatgttccttccggcataagccggaaggaacatttgttatatgaggatgagcaaacattcatcctgccttatccaccggaattttctggtgggaatcagctactcggacgccacgcccggccagagcttcgtctacgatcacctcggtcaattgacgcaaatcactgatgccgccggaatgcgaaccttcgcctgcaatctctacggagaaccggaaacagacagccttgcggcaaacggcatcgcctggcaggtctccgagcgctatgacgggctcggccgtcaggcggggtacgaattaagcgcggacggccgccgcatccagcagacgcacctgtcctatgacggcaaaggccgcctctccaccctcacggcggaaggcatggaaacgcccttctcctggacttactccgaacagggagggcttgtggaacaactcgcctaccccaacggcatgacccgggtcaacacctatgaagacagccgcgacctcctctccgtcatcgactaccagaggcccggaagcgccaacccgccggcgaggcacgaatacgactacgacgcgctgggccgtcctacccggcgcagggacacgtggaacacggcggcgcccaaaacgacgcgtttgttcacctacaacagccgtggcgaactggtcggagaccagctcaggcccggcggccgctttggctatcagtacgacaacatcggcaaccggaaggaagccttcgaattcggcagcaccacggactatgaaaccgatgaactcaaccggtatgcgggcatcgtcagaaatggaggggaagcctttacaccccaatacgacgccgacggcaaccagacgctggtgaaaacttccaccggcatctggacagtcacctacaacgccgaaaaccggcccgtgaaatttgaaagcgaggacggcgggacaaccgtggaatgcgcctacgactccatgggcaggagattcgagaaaaaagtgacggttggagggacaacgggcttccacgcgcgctacctctaccgtgactacctgcaggtggcggagtgcgacttgaccggggaaacgccggtagttgtgcgcagttacctctgggacccctcggaacctgaggccacgcgcgtcctggccatgacgcgctgggaagcgaacgggacgcaggtgaaggaacatctctactgcatgcacgacgcgatgaagaacgtcacctccctcttcggggaagcgcgcggacgccgcgccctgtatgaataccggccgtacggaggtctgatcacgtcggaaggcaacatggcggaagagaacaaattccgcttctcgagcgaatacatggatggcgaactggggctggtctatcacagtgttcatcggtatcaattcgtttgatatctttggagcggcctcattcctgttggaaatctgtcaacggggattggaaagagataggtattcatgcagagttagttctgtaaattttgttgaggaagtcttttggaattctgtatgggattcaagctgcatccggtatgttccgggtgcagtttttgtgtaaacgggttgagaaagacttgccgttatccgccttccgggaagaacggaaagcgggagcgcagccggaagaattaattttttcttaacaagaagaagaaggaagttaactacccagaatggaatttccggatatattgaggcaatgtttttacattatattaaacatcgccggtccgttccgggactccgtatctgccatagcggtttttccgtgaaattttttcaaatgaaaaagaaaaacggcatagaataatatttttgtttccatatatgttggaatggtttgaatttaaatttcataaaatatcatgatggaatcattgttgggttttatcttttgtctattgagcggaatattctgtttttggctctttttcaaatgcgtcgactggtttgaaaaaatctaaaactgtgcctgtctatgtatacattattatttgtgattagcttaattgtgttcggttatttgatgtatgtcttgatcaaaccggaaaaattttaaccagcaagatgatgaaaacagaaattctaggtgttattgcgcaaatcgttcttatggtggctttgagctatcctctggggaaatatattgccaaggtttacaagaaggagaaaacatggcttgatttcatgaagcctgttgaaaggctgatgttccgcctgtccgggattaatccggaggaagaaatgaactggaagcagttcctgcgggctttattgaccgtaaatctgttctggttcgtatgggggatggttcttctggtcagccaggggtacctgcccctcaatccggacggcaacgtcggacagacgtgccaccaggcgttcaatacatgcatttcattcatggtgaattgtaacctccagcattacagcggggaaagcggtttgacctattttacgcagttgttcgtgattatgctgttccaatttattacggcagctaccggcatggccgcaatggcagggatcatgaacgctctcagtaagaagacaactaaaacgattggaaacttctgggattacctcgtgttgagttctacccgcattttgctgcctctttctctggtggtcggattcatcctgattactcagggtacgccgatggggtttgacggtaagatggaagtgacaacccttgagggagtggaacaaaccatttcccaagggcctgccgcggctgttgtgcccattaaacagctgggaacgaatggcggcggttatttcggcgttaattcatcccatccgctggagaatccgacttacctttccaacatggtcgaatgctggtccatcctgattattccgatggcgatggttttggcctttggtttttatctcaagcgcaagaaactgggatacagtatttacggcgtgatgttgcttgcctttttaattggcgtttgcattaacgtgtatcaggagatgaacggcaatccccgcatagaagagatgggcatcgtccaggaaagcggggctatggaaggtaaggaaatccggctcggatccgcggctacagctttgtggagcgtcgttacgacagttacgtcaaatgggtccgtcaacgggatgcatgattccaccatgcctctttcaggcatgattcagatgttgaacatgcagattaatacgtggtttggcggcgtcggggtagggtggatgaattatttcgccttcataattatagccgtgttcatcagcggtctgatggtgggaagaacccccgaattcctgtgcaagaaagtagaagcccgtgaaatgaaaatcgcttccattgtggcgttgctccacccgtttgtgattctcgtcggaacggctctggcttgttatctgtttgtttacgcgccgtcgtttgtggaaggcgaaggagggtgggtcaataatcccggctttcatggattgagtgaatttctttacgagtatacttcaagcgctgccaataacggttccgggtttgaagggctggccgataatacctggttctggaattactcatgcggcattgtcctcattctgagccgtttcatcccgatcatcggccaggttgccatcgccgggcttctggcgggcaagaagtatattcccgagacgtccggaacgttgaagacggattccgtaacgttcagcgccatgacttttgccgtgattttcattgttgcggctttgtccttcttccctgtccatgccttaagcaccattgccgaacatctgagtttgtaaatttagggtagaatacgtttaccaccaataacatatttacatatttccgttccagtttctggaattgaaaaagaaatctacgatatgaaaaattccaataatacttccctgttccaaagggaacaggtacgggaaagcttgaagcagtcattgatcaagcttcatccgggaatgatgatgaggaacccgatcatgtttaccgtggaaatcgccacgatgatcatgcttctggtaaccgtttattccctcttcagcgacggacaaggggatttcctttataatttcctcgttttcgtcattttgttcctcacccttctgttcgccaattttgccgaagcgattgcggaggcccggggaaaggcgcaggccgacagcctgcgcaggacgcgtgaggaaacgccggccaagttgattgtcgatggcacggttaccgtcatcaatagttcccagttgaaaaaaggggattatttcgaatgtgtcgcgggagatatcattcccgccgacggggaggttgtcgaagggctggcttccattgacgaaagcgctattacgggggaatccgctccggttatccgtgagtccggcggggataagagttccgtgacgggcggcaccaaagttctgtcagaccgtatcaaggtgcttgtcaccgcgcgtcccggagagagtttccttgataagatgattgctctggttgaaggcgcttcccggcagaaaacccctaacgagatagcgttaaccattttgttggctgtctttaccctggttttccttgtcgtctgcattaccttaaagccggcagccgattattccggaacggaaatcagcattgccgccctgatttccctgttcgtatgtctcattcctacgactatcggcggattgctttctgcgatcggcattgccggaatgaatcgtgccttgagggccaatgttattacgaagtcagggaaggctgtggagacggccggggacatcagcaccctcctgcttgataaaacgggtacgattacgattggcaatcggaaagcgacgggatttttccctgtccagggttttgacaagcaggcttttgttgaagcctgtctgatgtcttccgtttcagacgatactccggaagggaaatcgattatcgagcttggacatgaatacggcgtccatatgcgcaaccttcatacggagggggcccgcatgattcagttcacggcggagacgaagtgttcgggcattaatctgagcgatggaaccgaaatccggaaaggggcttttgacaccatccgcaagattgccgaggaagcgggaaatccatttcccaaagaagccgaggaaatcattgaaagagtggcgggcaatggcggcacccctcttgtcgtctgcatcaacaggaaggttgtcggcgttattgagttgcaggatatcatcaagccgggcatagaagagcgcttcgaacgcctgcgcaagatgggagtaaagacggtaatggtgacgggggataatccgagtacggccaggtatatcgctgaaaaagcaggcgttgatgatttcatcgcggaagccaagcccgaagataagttgagttatatcaggaaggagcaggcttccggcaaactggttgccatgatgggggacgggacgaatgacgctccggctctggcgcaggccgatgtcggcgtagccatgaacagcggaacccaggccgccaaggaggccggcaatatggttgaccttgataatgaccccaccaaattgattgaggttgtagaaataggcaagcagctgctgatgacgcgcggcacgttgacgacgttttccattgccaatgacgtcgccaagtacttcgcgattgtgcctgcgctgttcatgattgcgattccagaacttgctgcgctgaatatcatgcatctgcatagtccggaaagtgccatcctgtctgcgattattttcaatgcaatcattatccccatcctgattcctctggccttgaggggcgtggcgtacaagcccattggagccagcgctctgctgcttcgcaacatcctgatttacggagtgggcggtctgattgctcccttcatcggaatcaaactgattgatatggctgtcggcctgtttttttaactgaaataaatatattgttatgagaaatttagtgaaatcattgcgtcttacacttgtcttttgcgtctttttctccatatgctacatcctagtgctgtggatattcggattgattgccggccctggcggaggaaatgcggaaaccctggttttgaacgggcgcgtggtaggcgccgccaatgtcgggcagcaattcacgaaggatatttatttctggggccgtccgtcccatgcgggcgacggttatgacgcgtccagttcatccggcagcaataaggggccgaccaacgaagaatacctggccgacgtgaatattcggatagattcgttcttgaagaaacatccttatttggaacggaaggatgtcccttccgaaatggttacggccagcgcttccggcctggatccgcatatcactccggagagcgcctatgtgcaggtgaagcgcgttgccaaggcccgcggcatggaggagggggcagtgaggtctcttgtcgatcaggccgtggaaaaaccgctgctgggcatgtttggcacggagaaggtcaatgtgcttaagttgaatattgctcttgagaaggctgatccttcagggaagcattaatttcctgattgtttagggcagcaatggcgattccggatttggtgataaattgccgccttgaaaaaatgaaatcaattgcgggcttcatgtcatggtaacgcccgcaattgattttcattttcaaaagattctgtaaaatcaacaagatgtttttaaccgcaggagccgggtgaatttaatatgattgacggaagtaacggagcagagcactttcttgacctgatacggcgttctcgaaggggaaagttcaagatttacattggtatgatggccggagtaggcaagacgtaccgcatgctgcaggaagcccatgaattgctgaataacggcattgatgtcagaatcggttacgttgaaacccacgggcggcccgggactgaagccatgctccggggggtgcccgtcatcccgcgtaaagtggttttttacaaaggcagggagattgaagaaatggacctggacgcgattcttcaagcccggcccgagttggttattgttgacgaactggctcataccaatgtggaagggagccgccatcgcaagagatgggaagacgtgatggagctgcttgacgccaatattaatgtgatttccgcgattaatatccagcacatcgaaagcctgagcggcgaagtgaaggagattacggggattgagatgaaggaacgggttcccgacaggattttgcaggaggcggacgaagtggtgaatatcgacctgacgtccgaggaattgatcggccgcctcaagaccggcaagatttaccggcctgaaaaaatccagattgccctggataattttttcagaacggaaaatattcttcagctgcgtgaactggcattgaaggaagttgctttccgagtggagaaaaaagtggaaacggaagtattcccggcagtttcttccgccagaagggaaaagattctggcctgcatcagcagcaatgaacagacgccccggcgcatcatccgaaaagcataccggatttcctcgcgttacagtacgtcgtttatcgccctttacgtccagacgccaagggagtcccccgaccgcatcaatctggcatcccagcgccatttgcttaatcatttcaagctggtggccgaactgggagggacggtgaagcaggtgagtgcggaagacataccccaggcgatcatcgcaacgtgcagggaatatcatattacggctatttgcatggggcatcccgcattcaaaatgcccggagccatgttcaagatactgggatataaacaatttctgcgtgttttgtcggagatgaagatagatttaatcatcattgcataaaaaacagaggtaaatttgaaaataaggccggagccggctcttttcacaggaagcaggcgatgagattatcatgcttgtcttccctgagcggaacggattgttgccggcagtttccattatagcctccccgggggcgttttccgttaccattcccgggcagtgcggccccttttatttttttccgtctggttgtctgaaaaacagtccaatgttccggtccgccgcatctccggcagcacctttgttgaaaaagaatgtagaattcccggaggagcagcattcttaaaagtgaaacgataacgttccgtcttccatagaggagcggcggttatcataaacagaaggaacagttatgagcatcaatttgcaaaaagtcattatagccgtatgtgcggccgcaacggtcagtgcgggattcgcagcccgcaccgagggggccaaactgcaccgattcagcactactatcgaaaaagagaggccgcagttgaatgaagaaacgaaacggttgattgcttcctatcgccggaatccgtccgaggctaatcggtcggctttgaggaaacaggtcgggattaattacgacaaggtccttgaccgaaaaaaggcgaagcttgaagaattgaaacgaacggcccggcatgcgtccaagatacaggaaatgcaggagatcgtggatgaaatggttcaaaacagggaagcgcgcatcgaccaaagcatgcggcgtttcagtgatccgcgattcagaccaggtgcccgctatgcagatggcgggtatttgccggtgctcggagcttcctggaatgtatcaattgcatatactccggttaccaatgaggattatgcccaattcctgaaggcaacgggaaggaaggctcctaaggattgggataatggcgccatgcctgccggcaaagggaggcatcccgtggtgaatgtttcctatgacgacgcttctgcctattgccaatggttgtcgctccaggataggaaagccgtttatcgcctgccgactgaagaggagtgggagtttgccgccgggcatatgcccaaggatgcggattttaattgcggcgagagaaacgggacatctcccgtggacgcccatgccgcgacatccggcgcctgcggagcgattgatatgtggggcaattgctgggaatggacttcttctccagttgaagtttccaaggccgtggcacacggtaaaacggtcatggcggtgaagggaggttcctggcgttcgccgcggacgagctgccgaactgagcggaaaggagaaggaagggaatcttctttcgctttcagtgatgtcggtttccgggtcgtccgcgaaggttgagggggattccatgcgtttcagtttcttacaggcaatagaatctggctggcagacctgatggaaattccggccgaattggtagatttccctaaggaactgcattcttgaaaagtgaaacgataccgtttcagaaaaaatatcaaccctcattgattatcatgaacaagctcattattcctgcaattattggaatattcggtctggctcccggtacggttactgccaacgcggcggaatcaacaacagcctccttttctgttcaaatactgaaaaagaaaccgaaggcgttgaagtacggcctgaaacacggcctcaagaaaggtttgaaacacggtctgaaaaaaggcaggataaacggcggtaaaaaatagtcgccgtcatcttatctgctgccgggcctgcagcccggcagcgttttcccatcaataaggacgttttatcacctgtagtgcggaaacatatctgacttccgtacagctttgatacattgcccatcatgtcttaaaaagtcaacatattgagaagaaaggcgttttatggtaaaatggttgttgtgcggagccgccatgatttccggcatcgtgatcgcggctgagacggaaaatcgttcattccagtttggaaattttgaggtgattgctgttcaggatgctctttcagcgatgtgggtcgaattattcccgggtatgtcggaagaggagttcctccgcttaaccggaggcgggagggttccttcttccgtgaatgttttcctgttgaaacgcggcgacggaaaaatcattctggtggacgcagggaacggaggaaaacggggtgggatgcttcgtaaacttgaacagagcggcgtttttccggagagcgtcgatttcattttactcacccatatgcacggcgaccacatcggaggattgcttgggaaacatggcgaagccgttttttccagagccctcgtctatgtttccatgccggaatgggaattttggcaaaatggtacggtcggactacagggaaaacaggttcggaaggtgttgcatgcttacggcagccgggtgagaacattccggtttggagaagaagttctgcccggcatcaaggctcttgacgcttccgggcatacacccgggcataccgtttttgagactgattccctgctgattgtcggagatttgcttcatgctgccgcgctccagattccgcgtccggaggtttgcacgatttacgatatgaatccgttcggagcggttcaggcccggcggcgcttttatgagtttgcggcttcttcctcgaagccggtcgccggaatgcacctgccgtatcccggaatcggccggataggaaggagtgcggcgggatatgtctatctgcccggaaaatgagaaaggataaaaaagacacggtacaatgacgcaagcagaaacagcatgcccggatgcctggggaagccatttccttgaataccggggaaggcttcttgccctggcccggaggaatttgaatccggttcttgcccggcgcgtttcggcggaagatgtggttcaggaggctctgctggcagcctgcgggaaaatggctttttttgaaaacaatccggagattcctgtctatttcaaactgcggacgattctgttccagacccttacggctatggaaaggaagcatctgcaatgtctcaagagagacgcctgcagggaagtgaatgtgacggatgacggcgtggggtccactgcccggttggattggaaccggtttgcagataccgtgaccgggcctcttacccgtgccgtcagggaggatcgttatacattgctccggaaagcggtcgaggcgctgcccgaaaacgatcggcagattcttgaacttcgccattttgacgacatgtccaatgcggattgtgccgaagtcctgcatattgggccgaaagccgcaagcatccgctatgtgcgggcgctgcagcggcttcggaagcagctgatggagttaaccgagtttcagccatgaaggggaagatttctctggaagatctggttgaacaattcctggatcagtgccgttccggcaatgttcccgatattcaggattttgccggggcacatccggagtttgcttccgagttgctggctcttcttccgcttgtgatggagatggaagattggagcgttgaaaaaaaacagggaattatgcctccggttcacgattttcccgatttggagggggacgattaccggctgattcggagactaggcagcggcggtatgggggtggtatttgaagcgctgcaattgtccctcaaccggaaagtggccgtcaagctgttgtctccgttgctgctgcaggatgccgcccaacgcatccagtttgagcatgaggcgcatgtgattgccaggcttcatcatcccaatattgtcagaattttcagtgccgcgtgccgtccgggatgttgttattatgcgatggagttgatagaaggcaagagtctggacggatgtgaattcagtaatccgtatgagatagcccgtattggcctccaggccgccagggcgattgcgtacgcccaccgctgcggcattctgcaccgcgatatcaaaccggcgaacctgttgctggatgaagcgggggaagtacacgtcagcgattttggacttgcttttctgcttcaggggagaaatgaagttattgagaaggaaggagctcagagcggaacgctgcggtatatgtccccggagcggctggtgcatggagtcaataccttttccagcgatcagtatgcgtttggggtgacgctttatgagcttgttgcaaaatccccgccgtttccggggctagctcctgaagaattgatggaacggatttgcagggaaccggttccgccgttgaagtgcagcgaacccgacttggccgcgattattaacaagtgcgtcagtttccgcccggagtcgcgctatcgaagcatggacgaactttctgaagatttgctgcattttttgaatcatgaaccggtcggggcctcctccccgtctccggccaggcggttgcagctgtggatgaaacgtaaaccggctgttgccgtattgtctttggctgcggccctgtgtgcggccgctttcgttgtcgcgttgggcgccggttatctgcagacggcgtctgcgctgaaactggcggaaaacaatgccgcagttgccgatgcggctttgtcacaagtgttcacccgtattgcggagcagcccccttcacagaaaaatacgcagctgctttcagctttgctaccctattacaggatgatcgccagaggaaaaaatctgccggagtcaaaggtttgcgaggccaatgccgtcatcggggaatgcgcactgcgcaccgggagttatgctcttgcggaagaagcgttccgcaacatgatgaaattcaggaaagacgcttttcccgtcaaccagttggcgacggctttgaaaaaacagggtaaagataaagaggcaacggaacttttccggcaggtggccgaccgctttgcgatgtcggagcgggcggaggatcggtttgaaacgatccgcgcgttgctggctttgtccggttctccggagagtgttgagcgttcccgggcgttcggaatgttggaaacattgttggaggatgatcctgaccatcctgaataccgttttcaatacgcacagcttttggccggaaatccccgccttttccgggagagacgcattcccggcattgaaccgaatgcagccgtgctgctcctccagcttgccgacgcccatccggaacggccggaatacggcctggcgctggtagagctgatgctgaagaaactccggtatgccaggaatttccgggaacataaccagagggagcttgccgatacggtgaatctttccgaaaggcttttcgggcgttggccgaatgatccgcagattatttccggcatggtccggctgcatgcacggtatattggggccctgcgacgcgaaggaaaagatgcctgggcccgaagggaaagcgaccgcctgcagggcatcctggaagttcttttttacaatcccgagatttccgatgccgtgaaagaaagcctgatccgcctccagcttcaacgtttgaaactgttacggcatgacggccggagttatgaaggagcggagctgcggaaaaaaatcagccgggagctgggcttttaccacgggccgatgctccgggtgtttcgggaggagttggagaaagtcgggtcggatgatgaatcctccgtcgggaaaagtgaagattccattatttttgaacgcaccaagcaaggtttgtaaattgtccgcttaccggcactcagcaatttgttgtgtgagggggaaaggaaagtgtcccgttccgagcggcgctgttgcagaagaaggcgggtattttcctccgttgcaggcggagtgtcagatgcgttcctggtgcatctttgttttccgagccagctttttgttccaaggcgctttctgagataaattgctgtattcccttgttgattccgtttttacggattgtctgaaaaacatttccttctgaaagcattctgccggaagaaggggatgtgttgttgcgtgaagcgagtagcctccatttgcccctcccggcagcaggcccaggcgtcagcaccttcttcaaattttttgtttcaggaagtaatccatccattccgggttcacctgtggcagaggttcgcctttgtcatatgcctcgcagcactggccgatatactccattttgattttggagtatttcagttcccgaatgcgcgttttcatggcctgatgcccttcctgcaacatgcggtaacgtttgcgcaatgtcgaattaccttggcgaaccaggtgaaaaaagcgtttgatttccttgagtttcaatccagaatgcttaaagcaaaccagctccggcagttcttccatttccttgcggtggaagacacggcatctcgccccgtttctcgggatgtccaggattccttcttcttcaaaaaaacgcagattggacggcgtggtgcctgtcaattccgagacttccgaaaaggaaaggcacatgtctttctgttctccaagttctgatgcgtcttgcatgaagacacgacggctttttcttaggctgcgggaaacgacaatttccgtgtatgggcgggaaagccggttattattgcctttttaaggtacgtggcattcattttctcaaactgcatgcggctttccgttttttctggagtttccagcagcgctgttccggttccggtgtatttttcatattcctttacatcaaaggttccgggggatatggtccccgcgtttttcagcaaggcaatgattcttttcaactgtgattacagtgaaggcgcccatgcggatattctccgcagaatggcggaaacgaatatggagcagactgccggttacggggaggacccctattgcgaccaggcccggaagctgattgccggcttgtgcggcagaacggatctggatatccatttccttatcggcgggacccagaccaatttcacggtaattgcggcggcgctgcgcccccatcaatgcgtgctgtgcgcggacacgggccatatcaatgtgcacgagtcgggagccgttgaggcttgcggacacaaggtttccgccattccttccccggacgggaagctgacggcccggcaaattgaggaggcgtggcatgcccactgggatgacgagacccgtgagcatatgcctcagccccggatggtttatatttcccagccaaccgaattgggcaccatttattccaggaaggaacttcaggaaatttccggagtttgccgccggcgggggctgtatttgtatatggacggagcacgcctcggctacggcttgtgcgatgaggacaatgacctggatttgccggcgatttcctccctttgcgatgctttttacatcggcggcacgaaggtaggcgctctgtttggtgaagccctggttctgcggcatgaggccctgaaggaggattttcgttacatcgccaagcagaagggcgggcgtcttgcgaaagggcggcttctgggcattcagttcctggagctgttccgcgacggcctttatttccggctgggcgcccatgcggaccgcctggctgtgatgctgcgggatttttgccgttccagagggctggcgcttcccttttccagtggaacgaaccaacagtttgtcacgatgcctgattccgttctggaggagctggggaggaaatacggctttgcctatttgcgccgggaggatgaaacccacagcacggtgcgcttctgcacgagctgggctacccgagaggaagacgtgcgggaattgatggcggatatcgcccgcctgtgctgaaatttccctccgtccggcaatgccgggaaactgcggaaagggtcgttccccattcatttgcggagaagcatttttgtctttccggggggaacctgttgagccatgatatggctatgcccttaatcgtgggacaggagtggcggaggagaatttcccgcatgcagtggctgctgaatgccgtgctggcggtggagtgtcttagcatgcctttttttgccgccggtgcggtagctgggatggtctggtacggcggacgcaggatgggggctgactggggctggctggcgggaggcgcccttgccgccgcaggtttctttttggcggtgtgggggtggctgcggctccggggccgttttttcagcaggcgtgatacggcggcctttctggatgaacagcttgggttgcatgcggcgttgagcgccggtgaggaatggggccatgccgtggaggcaggggaaagcgcggtacaggggaatcccgtgctgcggatacgttccgcctggtgcctggcctggctggcgggaggcgcggttcttatggcttgcggggcttttttgccgttgcccgcgccgcaagccgtggggcagcttccggatttgccgcccgttctggcccgggtgggggaggccctggaccgcctggcggagatggagagcgtggataataagagcctggagcctttccgggagcagttggaggatttgaaaagaatgcaccggaatgagatgtattcccatgccggactggaagcggcggatgccctgaaggggaaaacggcagcggccgttgccggattatccaatcagatgtatcggacggattccgccctttccctgctggacagcctgaatggagcgtccagcccggaggcgatgcagtcccttcaggaggcgttgacgggaatggagtcccttgccctgcagccgggcggcatcatgagccgccagctccaggagctgaaggcttccctgccttccctgcagattgatccggagacggcccgccgtctgcgggaacagctggaacgggccgcccagcagctgcggagcatgtgcgggcagtgcggcatatccctgatggcgtctccggatgaccgtaccgtgatggagtccgggcagggagagggaaatgaacccggacgcggaggaacggggcgtggacgcggggacgctccccttgcctttgagatggaagagcgtccccggcttgacacggtttccagacgggtggttcatgaggacttgagccgcgccgctctgggggaaactgcgggggtggagacggcggctccctccccggaaggggctggaaatggacaggaacacggcggccggggggctcgtccggcccgcggtggagatgccgtgtggtctgattgccttactcctcaggaacagtcagccctgaaggaaattttcagatagattgattgttttctcctgaaggtcgggagcgcgtaaccccctgccgcggttgtccccggggaagcaggccggtcctggtaaacagagcgtccagaacaaggaggacgcaggcactccacagcaggatgggacggagttggaggcatgttccgggcctcggttcccggaaaatggagggaaggtccatcctttccctgcctccggtccggttcaccaggtccaggaaggcgttgccggattcaggcggcatggcccattccgggtccacctgctggctgacagggccgaaggggataacgctgccgccgatgcggaccgcgccccgcgccatgactccgtgcgggaggggaaagctgcactggaatattcccggctgcaggtgttcccagataccgttttgtgtacgggagctttcttttccggagagttccagggatatttccggcatgcgttccgccaggcgcgggatgttttcctcactgtagtaaaggcgaatccgtaaccggtctcctgccgtgtccgcccgcacggagtatccctgtgggggatttttcctgttgagccaccgggccagggtttggataaggtctccgtagccgtcccattgctggatgttttttccgagttctccccccatggcgaacgtaacggcggccgtccgtcccgtccccctgttccagaaggagaccaggggcgccgcgtttccgtcttccgttacgcaggctgctgttgctccattccttaaataacacaggttataaccgtctacggcagggggccattccggctggccggctgcaatttgaagccagccggccgtaccgcgcagggaggtgcgttccctgatgaaggcggcccgggccacgctgacggtttcctgtgcaaagatgctggggatatcccccgggcggtcgcagaagaagatgcgcccccgtcccaattccgctatttccctgagcagtccggcatcggcgcttttttccgttcccagtgcgatgacgcttacggtagccccttccttaaccatttctttcagagtttcccggtagtcggcaggttcttcggaatcgtcggcatctgcaaagaggagcagatgccgtgttccggctacggaacgttgcagttcccgccagcccgctttcagcccggcgccgatgaagatgcctccgcccatggaggcaatcctggagacgctggatatcattttcttcctgttagggcccagactgcttagcgtgacaatagggtgcggttcgctgtccacggcgtggacggagatgagatcctggtcggacagcagggaaatggtctggcaggttccggcattggccagatccattttcgtctttcctccgggaacggaacaggacatggagccggaacggtccagaacgatgctcatggccgtcatgagcttcatcttgtccttcttcatttccatggaaacggggagcagttcgtcaatggaggaggagaagtagccgccggagccaaaactatgcctgcccccgcacatgagcaggcctccgccctgttcccttacgtaatagtccagggcatgcagaaagtccggtgggacggaggatgcggagaggttgttgatgatgaccagccccacgccggagaggtggcgggcatcaagccggttcaggccgggcggttgttggacgcggaacccctgcgcttccaggaaaggtgccaggggatcgcggtcgtagccggagagcagcaggacgccgtttcctcccgtcacttcaaggaagctgacggcacggttgttttcagggattggatcgttttgcggcgttatggtcatttcataagcggaacagccgggggtggagagcctgtccgccagcctcaccgtggctttgccgttgagcagggtagccgtcccccgcagcggagcccccccgtttttgctgatttgccacggaacggtgatggccgggccgggagggcctgccagggttgcctctaaaataaaggcttcgccgggccggatgcgcgccggggttcggatttgttctatgcggatgtccgcttcccggaaggtgacggacaggcggtagtccaccggaatccgggattggatgagctgttccgccgcctggtccagcggcgtggtgggccagccgtccgtcaacatcaggatgcggtttgtccggttcggggacatcagggccatggtataggccagggcctgttccatgtccgttccggcggttcccccggcaaagacggggtctccgcgtccccggagcacggcggattgcgcgaaatccaccaatcggacgcggtccccggcatgtttgtgccgttccagaatagcctggatttcctctgccccggctgccggaattcccgccgtggaatttgattggtccaccagcacccacaagtccatgtctttgccgcccctgtcaagggcaggctgagccagggccagcagcaggcaggtctgcaggaggaggcgcaggggggaggccaggcgcagacgcctgtatttccagcctgccgccagaagcagggggatcaggaagaaccattccggagtgttgaattgaatcatgggcgcagggaggtgtctgggacgggagggagccaggaaagaatcagggccaggaacgccagcgccagccagaggggggccagagggtcacgtttcatgtgccggagcgcctcttcatggggctggggaagtcctgtgtcaaacgtggagcagtgggaaaaatctcccatccgggcgtcggagaaccagacggagccttggaacaggggcgttttcccttctccgggggggaagatttccacatatccggtttcttccgggagcctgccgttaaagacagtttcacggcgttctccccccggcatggtttgaatgagttttccgcctgcgggcatggataagagagttcctccgggaaggttgccgtaatgtgttccgggcagattctcctgtacggattgcataaatctgcgggtcatgagcaggggcgccggaacgcggtccgcattggatttttcccagggccagttgaggaaaaggcgtttcccgtccacccaggccaggggggattccccctgccagagcaggacgccggctttttcccccggcttcatggaaccgatggaggggatgagcaggccgctccagttcagcccgtcagtcagcggatgccgttccgccgtgacagcgccgtaagatggcttgccgctggctgcaaatatgatggccgcttttccgggggccttggcgttttccgtttttccctccagcaggaggaggtcgggatctgaaccgtccgggacgggggagaatcccggcaggctatggatgatattgaggaagatttttccggattgttccggaattcccatgctgacggcaacgggggcgggagcggagcggaccagcaggagctcattgtccgacgggaaggcgtccgtcgggagccggagcacggcttttccgcattcaggagggaggctgtattcaaattccgtgacagttcctggattcaggaacagggaacgccgggcaggaggacgtccgccttccgtatggatggagatttcgctccgaagaggggatggactattgtttttaacggcaatcctccaatggccggggccgacggcctccaccggggttattcccgcaaaacccacattttccagaggtttccctacaccccgtgcggattgcccggcgggaaccctccgggcagtggatgtaatcaggcgcgtgatgcccgttggaccggcaacggctgtggcggtgcgcagggcaggggccaggtcatgtgttccttcgcgcggctgccagatatccagggcgtgcagggcctggcgggcggacggcccccggtagagcggctgtccggaagccctgctgcccatgagaacccatgtggccgggattccggaccggaggatggcgtccatgtcttcggaaacggcattcacggcttcttgacgaaagggggtcatgtttgcggaatcatccagaatgaagactacggtctggccggagcctttgccgggccagacgggagcggccagaacccaggtaagcaggaggacggccagaatttgcatccagaaggagcgcgatgcgcgcagcctgtcccaggcattaccctcatgggcctccggaaccagcgcttccaacaggaagagcgtggccgtggcctgggtttttgttttatgctggaggaaatggatggcggtgatgagggggatggccagaagcgcccagaacgcggtcgtgttggtgaagtgggggatcatgggcttggggggagagtaaagggtgcgggtgcggttcaggagagttccacggccccctgccgtaatgcttctccggacagggcttccgtcagcgtccccttgcaggggacgcgggcaagaacggtctggcggcgcaggcaggcagaaatccagagttcaaaatgggcggcgtaggcgcgggcgtacctccgggacagggaaggggtgatgagctggcggcgcaggtggccggattcacagtttttgagtctggcgttgccggcggggagttccgcttcttcctgcagcgtgggggccaggatgacggacatcccttttaaggaggccatggtttccagaaggttgtccggttcccccgggtagagcaggtcggagatgaagattttcattccattggggcgccagatggaaatggagggcatggattcatccgggggaaggctctggagctgcgcttcccattggccggagagaacatcttcctggtccagggggatgatacggctccctttcaccgcatgaatcttcacctgggctcccgttccgatggcggagagcaggcaaaattgaagcaggccccgcgtgcgtgccgcgcgctcttcgtgaaaaaacatggattcggaaacatctaccgccacgtctacctgcggtgacagttccgcccggaagactttcatggtgagctggccggttctggcgtacgccgcccaatgaatatcccgcgggtcatccccccactggtaggagcggcttccctgaaagtcgatggagttgcctgctcccgttccctcccaatggccctgtgttcctttccaggcgcagcaggaaaagggcaggcggagacggcgcgccgcctgttcggcgtccggctggatcacctggctggggaaggggaaagaagtcatggggatgggggagaggcaaaacggagggcaagaactattcccgttccctgcgggaatttcccggtttctggagaggttcgggggatgcgttccggaatatgtcaatccagtgtttgctggtgagagccagaacctctattccggcagccaggtccatcaggctgaatagggaaaatttgctgaaagccggcaatgtttcttgtctcaaaagttcagataaataccctccggggagaagggggacggacagattcacgccccacagcacgttttgcaccaggcagaggatgaggcagatcatggtgtacgtcagcagggtattgtttttcagtttttcccagaacggtttcagaagcatggccggcatggtgatggcgtaccagccgcctgctgcgaggcaaaagagccgttgaggggactggaattcggggacggatgccatgcggtctatcagatacacggcgatagccgccagggcgcagagcaacagggtgaacaggacgctccccggcatgccggggaggaacagcagctgctggagcctggagaatcttttgtttttcatttgctccatgtgaatgggaagaaggcgggcaggcgtgttcaggttgataatcatcaggaaaattccgtaaaccatgacaaaaatggaatttccggtcatgatgttttgaatggagccgcttgcgttttccagaaaggggagggggaggatggaggctgcgaaaaaagccagcagaagcttccgcaggggggcggccgtgttttgtgcggcaggggagaaccattcccttgccagcagaagcagggatgagatgaccaggaaggcgtccgccaggacgaggaatatcaggagaacgccttctcccgctccatcccggaaaaaatccagattctcatggctgcctcccagggtcaatataccgatgcccatgagggagaaagcgatgatgcgcatcagggagggcatggcggacgcccacagggtatatgcggtcagcatgccggagcccaggtaaaggaggaaaaacagggttacatcctgtaccaggttaatttccccgtagtaataccggatgagaaagaagggcagggagataaaggcaatcagcagggattgggccatgaaggatatccattttcccagcacgatgcggcctgcgctctgcctggtgagcagcagcagttcgttgtttcgggtgagcagttcgttcctgatggaggtggaggccctcagcggcatgatgaagagcagggcgacgaccatggtaacccagaagatgatctggcatccgtcggggctgacgaagggctccccgtcaagaggattgatgatgaagctgaacaggaagaaaaaggagagcagggagggcactatgctgaccaggaggatgaatgacggcgttctgagaccctggcgcaattccttgaccagagcggagggcatccatatggggaaatcaagagagcgggaggtattcatgaggcggggatggatgggctttcctgggaagaggcgggattctgccgcggggccggttccccgctgccgtggataaggatgtccacaaaagcttcttccagacggcgttcgctgcggtgaaaatcaattacggggaggtcgaggcagagctggcggagttccgcagccacagcttccggttcgcaggagacgaaggcggccactactttctgttgctgtacatggcgcacgttccatccccggcggagggccagccattcctccagtgaggcggtgttgtctccggccgtgcggatttcaaaggcgtatccggattccgtctggcggtgcagcaggtcttccatattgccgtcatggatgacggttcctgcattcatgaagatgagggcgtcgcacatttcccccagttccgagagaatatgggagctgatgagcagcgtttttccacgcgctttgagcagatgcaccagatttttgaattcaaggcgcgctttagggtccaatcctgccgccggttcatccagaatgaggaattgcgcgtcgctgatcagcgtgcgcgccaggcagagccgctgcgtctgcccttttgaaagtttgtcaatcatctggttctggaggccggccagttccgtgaagtccatcacttcgtccacggcgtccagtaaacgttccctgcccatgccgcaggccctggcgaaaaaatccagatattcccggacgctggtgtttttataggggtggaaatagtccggcatccatccgatgcgggaacgtgccagttcaggatgattcacaacatcggccccgttgagcctgatgtggccggagtcaggcatttccagcgtggccagcatgcgcatgagggtggttttgccggctccgttggagccaatcaggccgacgacctggccctggcggatgacgaaggaggcattgttgacggctttcagcggaccgaatgatttggacagtccggaaacttccagcagtaggggcgtactcatggttattcgtgcggctggggagtgacggggccggagacggtgacggaggttttttcccagttaatggaaggcagggtggggatggggcccagttccccgcccgccggttccatggatgcccggaagtgcagcgggggagggccatccggttcttcttccggcaggaacggggatgccttcattttacggccgggaggcagttgttcaagagtccagtattttccggaggcgtcccggtaggtgagtccgttcagggttccgggaaaggtgctttggaatacgggcgccccgccggggctcgtctccagcagagtgagcgccgcccgtgtggaaaccggcatgatgatccggtgctggagcgtggagcggctggtgaaccattttcccccgcattcttccccttgccgcgacgcgccttctatgggtttttccttaatggagccgcgcgccttgctcatgcgtgctccggtgatgccggcgttttccggcaattgaaatgtattgttcagcaggacggaggtcttgcaaatctggttttgggagatcagggcggagtggtcctgcggattaacctggataagaacttcccggctgcccgtccctcccgtgccgtctccggccagaatcaggagcagcagaagaagggaaaatcccacggaaatggccgggatcagcaggaacagcctttgccttttgcctgcgggagcccacaggaacaggctcagcgggccgacaagcacggcaaagatgatcagccccagccccagcgtggtggatggggctgagaaataatagggagcggcggaggtaatctccgggtaacagtttcccttttcgtggaggttgatgaattcctccagtttcagctttttttcttcttccggcaggccgtccagggacggaacgtgcagaatgcgcccgtttcccagcaaccgggtggaaacggaaagccccctgtcaccgatgagccacaggtttccccctcccgtcacccattggcggatggctttgcggtgggcttcgtcaaaatgggtacggtaggttttttccgggatgatgaggcaggtttgcccctcgtacatccggtagtcggctggccatttcatcaggtcgcaggaggaaacggccgcgttataggaagattcggaaagcaggtgccagtccgccggagtgccttcctggataaccgcgaccattttccagtgctccgtatccgtgggaatgggggaagctccttcgtggttttccttcacttcgtagacgagattgtaggagaggagagggtaaacgactgcatgaacgctttcccgggccggaatgaagaacggataagtatggctggttctcctgtttccgttccacccttcatggaattgaagagtggctttcctgtccgagccggtggtgttttccagcttcacccggagagggacgcggacgtcgttcgcgctgtagtcaaatgctttctccacggaaacggcgatggggggagcggcggccggttttgcgtggagggggagaatattgaatgccgaaagaaggaagaggctgaagaacagccatgaacgggagagagggcggcgcatgggggaagggctgaggaggtgtggtcaatgaatttttgcggcggccagggaatccggcaggggcttgttctgggcagggatttccctgaccaggcggttgatgactgcggcgggtgtctgtccgtccagacgggccgtgtggttgagcaggatgcggtgctccagcacgggatgaataacggcctgcacatcctcaaaggagcagaaagcgcgcccgtggcgcaaagctcgggctttagcggcagccgccaggcccagggccgcccggggactggccccgtatttaacgcctccggaggcttccgattctccgggatgcgtagcgttgaccagcctgcctatatagtccgccaccacttcgggaatggctacattccgggccatttgcatgagttcctgcaattcctgcgcgttcaaaaccggggatatttcaggttccacgcccatttcccggttgaggacaatgcgggtcagcacatccgccggtgtgcggttgacgttgattttgaaaaggaagcggtccagctgggcttccggcaggggaaaggttccttccagttcaatggggttctgggtggcaagcacgaaaaagggggaggggagggcatgggtctctcccatgacggtgacgcggcgttcctgcatggcttccagcagggcggactgggtcttgggggaggcgcggttgatttcatccgccagcatgatgttggcgaagacgggcccttcctggaagatgaagttttttgttccgtccctttcctgaagaaccggggttcccgtgatgtctcccggcagtagatcgggtgtgaactggacgcggcgcgctgtgatatccagtgccctggagaggcctttgaccagttccgtcttgcccaggccgggcaggccctccagcaggatatgcccgcgagccagtacgccaatgagaaccagttcaatgagatccttttgaccgaacaggacctggttcatggcggcagccagagcacggagcttttgcatggcgcagccaagttcttcctgagagaggatagggggggtattcatgggaaactgacggatttccgcggcttttgggaaaaagaccgggcatttgttagatttcttcatgaacttatgccatgcatccagaggggctgcaagcagaaagatagcgggacctgttaattttcagtaatatgaagagaaaataccctgcggggtttgagtggtaaatggaattgccgcaatatatgttccatctgttgaaaaaagaaggtttcctggcatgtattattgtcatgccttccgtatatccccccggcaacgaacgcatttacgtggtggacgctctgcgcggctttgccgtaatggcgatcatgctgctgcattttcttgaacatttcatctataattcctatcccgtggcttcttccccaatgatggaagcggccaaccagcagttcaaggaggtcttttttttcctgtttgccggcaagtcctacaccattttcgcccttctgttcggattctcttttgcggtccagtaccgtaaccaggcccggaagggaagggattttgcgggcaggtttgtctggcgcatgtgcctgctggcggtgttcgcctgcatgaatgcagcgtttttcccgggcggtgatgttctgctgactttttcacttgcaggtttgttgctggtgccgtgccgccggttgaagacatcctcgctggtggctttgtccctgtttttcctggcccagccgctggagtgggcctatgcggcggttcagtggatgcatccgggctgggttcctccctccctgtctgttgcggaatcgtacgcttccctgaaatccgccgtggatacgggaaatttctgggtgatggcctgggagaacctgactacaggacaatgggccagcctggcatggggtattgaagccgggcgtttgatgcaggccccgggtctgttcctgctggggtttgttctggggcgccaggatttctttctgcagaatgacggaacggctgtgttctggacccgcggactgctgttttccctggccggggcctgtgcattttacgtggtgatgtgtctgccggggctgccggggcctgtgcataccgtgtttagcatgtggcacaatgtttgctttaccggcgtatgggtggccgggttcgttctgttgtaccggctggaatatttcaggaaagcgacggctccgctgctgacctacgggcgcatgagcctgaccaactatgtttcccagtccgtgatcggctccctgatttttttcccgtatgcactggggctggctccctactgcgggtatctgaccagttttgcggtcggctttgccgccatgaccggacagatatggttctgccgctggtggctggagcggcaccgctacggggtgctggaaggattgtggcaccgggcgacatggctggccgccgggaaggtttccgctccggaacaccggtaagaaacgggggccggcgcaatgatgtttcccgatacttgcgggacgctttttagcgtcttctgccaaagccggtgatttatccggacggaggatgcatccggttccgcaaggggcattttggagaggagacatggaacagggggcagaggcaggaggaaaagggatgaatgtttcatggcggcgggagacatgaaagcgcggtattttttgaagaatggctttccgggagattttttccacagggaacggtttgttttcctggggatggcgtaccgctgccctctccgatccgtgttccggcggcttttccgacggactgatgcaggaggggattccgtaccagatggcgcttttctttaaaggggagatgtagtatggcatggtgtatggaaaggaggacgggcataggcggttttttcgggctggaattgccggagtacggcaatttcccgcaatggcatcccggcaggagtgtagccgttaattccggcagacgcgctttggaatatatcctgcgccgcctgggggatgtgcgctgtgtccgtgttcccctgtatacatgccggacggtggtggaaacgatggaacggcttggcattcccgtgattacttaccgcattgacgaacgcttggaaccggaggaactgccggaattggaaaagggggaataccttttgtacaccaattacttcggaatcaaagagaaatgcgtggaccgtctggcttcccggtatggcggcagcctgattgtggacaatgcgctggccctgtattctccggcccgttccggagtggcctccctgtacagcccgcgaaagttttccggtcttcctgacggggggatcgccgtgatggatgcggagcggtccttgccggaaccggaggagcgggacgaatccctgcctgccgccgcttttttgctggaatgcctggagcatgggcaggaaagggcttccgccgcctgtgaacggaatgaacggcgcttgcggaataccccgctgcgaagggtttcccggctgacggagcgactgatgagcggcattgattatgaacaggcgcggctgctccgcatgaatcatttcctttttcttcatgaaaggctgggccatttgaaccgtctttccgtggaggcggattccttgtccgctccgtgttattatccgttttggacagcttttcccgagctgaggaacgtgctgattgataagcgcgttctgattcctctcctgtggccggaggtattggaacagtcccctgccggcagcctggaacggaaactggcgctgcatcttctgccgcttcctgtggaccagcgctgcgggccgcaggacatggagcgcatcgcccggattgtggaggcattctattcctgaagaaaagggaggattattttgttagacagttggataagacgttgacgatacgtgaatgaatgttctaacatttttggtatgtccgactacctttcctctctgggctatcctttccgtggaaggcccatggtttttgtcttttccgtcatgatggtatggggcgtgttcctggcggcccgggatgttctcatcggatggattgccgccttttgttttctgttgcctttcatgtgcgcctttttcatgaaaatggtgaggcagtccgccatgggagaagaggatatctgcccctttcctgaactggatgaatggcttgtctccctcatgttgccttttgtccggctggtggtgtgcatcatcgtttccttcctgcctttcgccgtgtatgcgcatactgcggcctgggcggcggatactaccctggcgtggctgttcctggcggcgggtgtgatttactttcccggtgtattcatgagaacctccgttcgggaacgtttttccggtctttctcccgtgggctggtgggggctggtcagaagggctcccttttcctatgccgggttacttggcgccatatgcgccgggggatggatcatcctgaaccttccttcagggcctttgatggatttcgccatggtgcccgtgaagctgtatgtcgcctgcgtgttgatgaatatgtgcggactgttcatgctcaagcatgaatttgccggggaggaagaggacggcagcttttccccttccgggcctgcggcctcgtgatgctgccgcctttccggcgggccgggaacaggtgagtttatttggcgggttccttgtccaggttcaggatgcccagtacagacatgttgccttccgcatcttttccggaggggagatagaccttcgcattgttcagcatgttttcaaaggccttggcgcggagcatgttcggtcccatggccttttccttcaatgccagtccttccgcttccgcccgggctgcttccagggctgcttccgcctgggccttgccccgcatgacaatgactttggcctccgcttctccccgggccaggttagcgtttgcttcctggcgcgctatttccattttcatggcgccttccgcctccccgcgtgcacgctggatagcgatgtctttccgggcgatttgaagttccgtttccttgcgttcgttttcctgagtcgtctgaacttttctgacgacggattcaatgatggcctgcgggggatttgtttcccccacggctacggaatccacaataaagggggtgccgtccagccgcttgcttaactgcgtgtaaacgttgtcggaaattttttgcaggctgccggaggcgtccagggcattgtactggcttaattccgcccgcacggctgtacggaaaggctgctgaatgaaatttttgtaggcaaagagcatgatttcgtccgccacttcgtcatcattgcggccggagctttgggcgatgcctccgtaatcttccatgaattccttgacccgggacgggtccagccggtaaaccagagaagctttgcaggaaatggggagcttgtccttgcccaggatagcccctccattgcgggcgtcgaattcttccaccgtggtatccggagtgatggaaaccttgctgacttcctttctccacgcccatcccgtggaggacggcccgatcaggatgccttcaaacctgttctgtccgaaaatgggtttggaatagacatatccggcaaagccggacaatacgcgcttgttgctgaaattctggaaggcaaaaatggcggcgcccgcagcgacgaagatgacggcgggaatgagcagggagaagacggttttgggagatttattcatgacagggcagcggttgtgacggtatccaacataagatgaggctggtgaaaatcaagttatcttttcctgtgcggccgggaaaagtgttccactgaaaaaattctttccggaagagggaatgcggcaaagtatgtcctcttctgaacacaggggagtgccggaaatgtcttatccggcaaaggctgcctgttccgtggggggattccggcgaggtgccggacctccgccccggaggcgggcctccatttgggttaaggtgatgaatgtagccattacgggatccggaggatttatagggagtcatttgtccaagcgtcttgagatgttcgggcatcgggtgacgcccttgcggcgctatctatttgcccaggagggcgtggattgcctggcgcaggccctggcgggatgccatgccgtcatcaatctggccggagcgcccatcgaccggcgctggacggatgcctacaagagggagctggtggagagccgcatcatgaccacccgcaagctggtggaagcggtcaacaggctgcatgaaccgccgggagtgatgatttccgcctctgctgtcgggtactatggctcgtccggcggctgtcatggggaactggacgctccggaagcggattcctttctggcggaattgtgcgtggcctgggaaaaggaggccgggctggtgaacagctccgtgcggctggtccttacccggtttggcgtagtcctttctccggatggaggggcgctccccgagatgatgcggccggcccggttcggcgttacggcaaccgcaggaaatccggatcatcttttttcctgggtggctttggaagatctggcggatgccctggtcttcattatgggcaggcagtatatttccggcccggtcaatgtaacggcgccggagcgcaccaccaaccgggaattctacagggcagccgcggaacatttccacacccgtctgtccatccgtgttccggacgccgttctgcggttgctgatgggagaagcttcccaggtgattaccggcggccagtgcgccgttccggagacgctgatgagggaagggtttacgttccaatatccggatatccgcactttttttaacaaagcattttctgtcaaatcatgagcatgatacagaccatcgttacttccctgtttcacggtcattccgtcaaaaccgatcccatgccggatttcaatctggaacgttatctgggggaatggcacgaaatagcccgtctggaaaactggttcgagcgcgggctcagcagggttcttgcccggtatgaccgcagggaggacggttccatttccgtggttaacagcggttatgacgttcgtaccggggaacggaaggaggcgcgtgcacgggcggtggcgggggatgcccccaatcatttgaaagtgtactttgtaccattggtatatggccggtatgaagtggctttcctggatgaaaattacacccgcgccgtagtttccggcggttccctgaattatctgtggctgcttgcccgctcgccgcagttgaaggatgacgagcttcagccgatgcttcattgcgcggaaaaactggggtatgatacttcccggttgatttacgccaatgtccaggcctctccggacaaatgacatggggcgggcttgaagaagcggtgtgccgtgaatatgggatatttttgaaatggggaatgtggaaaaggtggcttttctcctgccaggaaaaaatttttgggtatgggccgggcgttcctttccagtgttccgccgtgcgggaatgtcatgcttttgaattctccggtgtggttcttcttcctgcatggctccggtcccgtatttttccgctttttcctgccccgtcctttccgtttttttgcaaagaacagggaaaaacacaggcgcctgcttaaaataggcttgcaatcatgagaaggatggatatgttgacattcatccaaacattggatgtttggatgaattacttaaagaaggagtaacaatggatattattcatgacaacgccgctgatctcagcgcattgaacggcaagaccgttgccgtgatcggatatggcgcccaggggcgcgctcaggcactttgcatgcgtgattccggtgtgaacgtgattatcggcgttcgccccggcaagtcttttgacgccgccgcccaggatggattccaggtaatgagcgtcgcggaagccgccgaaaaagcggacatcattcacattctgctgccggatgaaagccacggcgccgtgtatgaagctgaaatcaagcctcacttgaaggccggcaagacgctttgctgctcccatggcttcgcgtatgttttcaataccatcgtcccccccgcggatgtagatgtcatcatggtggcccccaagggcccgggcacggaagtgcgccgagtatttgaagaagggttcggctgccccggcctgattgccgttcatcagaacccctccggcaaggcccgtgacgtggctcttgccatggccaaggctgaaggcctgacccgcggcggcgtgctggaatgcaccatggcccaggaaacttatgaagacctgttcggtgaacagaacgtcctgtgcggcggtctggtggacctgatgaagtacggttttgaaaccctgacggaagccggctatccgccggaaatggcctactttgaatgcgtgcatgaagccaagctcatcgtggacctgatttataacggcggcatccagaagatgaactccgtgatttccaacacggccgaattcggcgaatattacaacggcccgcagatcctgcccgcagaggtgaaggaacgcatgaaggaatccctcaagcgcattgaatccggcaagttcgccaaggattggctggaagaggcagccaagggcgctcccaacctcaaagccaagcgcgaagccctgggccagcacccggtggaaatcgtgggcgctaagattcgcagcctgtttgaaaggaactaaggtttcttttacttgaaacacgtgccgttccgtcggaatacggcggagcggcacgtatattcccgggcttttcccggaaatccgccattgattcagtttatggagcatgcctcaccggccgtcaatgtagaaaacgccagggtatacctgggtgggcacgaaatcctgcacaatatttcctggcaggtgcagcgcggagaacgttgttttattctgggggccaacggcgccggaaagacaacgctggtcaaagtgctgatggggtttgcatggccgctcttcggagccagggtgcaggttctgggcaagaccttcgggcacgtgaacctgctggaattgcgcaagtccattgcgtgggtgagtccgttcatgcacaagtggctggaggatggctcctggaacgggcgcgacatggtgctttccggccccgacggcactatcggcctcctgagggagccgacgccggaagaggaggaaaaagccgcaggaatcatgaaatccctgaaagcggagcatttgatggacagaccggtggtggccatgtcttccggggaacaggtgaaagtgctgattgcccgggctctgatgacgaatccggaactgatgattctggacgaacccagcgtttacctggatttggcagggcgggaatttttattgaaaaccattgaagagctggctgaaacgagacctgatctgaccatcgtgttcatcacccagcgcattgaagatatccttcccgtatttaaccgcggcatgattttaaagtccggagaaatcgtggcgcatggaagccgggacgaggtgctgacggaggcaaacctgaaagacgcctttgggctggatatccagttaatcaagacggagaaggggcgtctctggaccgttatccgataatttttcatgaagcagtccaagacaatggagctgaagaaaccggtgcgggtgtccctggcccgccaggtgcttaccgccatggaatccatgatacggtccggcaaatggaaggttggagaccgcattcccgcggaagcggaactggcccgtgccttttccgtcagccacaacaccatccgcgaagcccttcaatccctgattcatatggggatgctggaagcgcgccccggggacggcacgtatgtgatggcgtcagaccgctttgccgtcgcggtgagcaaccgcctcaaggaatccgagctgcctcagattctggaggcgcggctggctttggaaaaggaaattgcgcggctggccgccgttaaaaggacggatgaagatttgaaggagctggaaaatgccctgaaggactgccacggcagggtaaggcagggcattgaggatgacatgctgtttcatgccgccgtggcccgcgccacgcataatccggtgctctcggaattgtataacgtggtcatccgccatgtgcaggagaatctggaaaagctgcttcaggagaagcaatacgactccggcgccatgaagctgcatgacgaccttctcgcagccatcaggaatcaggaggcggatgaggcggagaacattattgtaaagattgtggaatttgacaccgtcagcataggcggggcattcatttcttgaattgccggcagggaagatgctgttgcggtggcagagttattcttttttatttcccggtgcttttcttgccagcgggctttccggcaaataactgcgttctggaattgcctgccaaattagtctttccgaacaaaggcgccggagacaattctcatgatttttatccttttccggatatggaattttactacaattcgaatatggctacccgcactgaatggaagtgcccggcatgcggtgcccttctggctatggaagatgtgaatatggctgcggatatggtgttatgccgctcctgcaataagataagcaaattttcagagattgttcaggaggaaagggatgaggaaattcttgattccattccccgccgcatgagcgtgacgaaaacggcgagggggctggaaataacgtataagaagccaaaaggtgcgggactttttctactgatgttttcgattttttggaattctgtgacatgcgttgccctgtttgcgatgatgagggaaatgtcttgtgaaaatctgttcggactattgtttttaatcccttttgttctggttggggctggtacatttgcgggagctttttatgtgttgtttggccgcatgacgctgatcctgacgccaggcaggggggaattgttccgaggagtagggaacctgggccgccgacagcagtttttgctggagaaaggttcccgtatttccattgaggcaagcagtattcgacggaatgatgaagttttagacaagattgtagtggggctgccggacggcaagatgtttgagtttggtacagggattgaggaagtggaggcccagcggtatatagcggctctgctgcggaaaatgaggggatagggctgtgatgcctgaatgcggagaaggtcttggaatgccctggctccgttgtttttcagcaagcaggggaatccgtcctggcgggaagggagcggggatatggatttccgtttccgggaaggaatggggcgcaagcctttttttgttggcaaaatccatggacagcgggcacggtttccatttgagcatttgaggaatgatggaggaaatttcgggaatgaggttttttgattgatatggagaataaggtacgtagattaacgtatgatgaaggaagtgcgccttttgttaattctgtgcggtttgttttgcggaacggcagttgcgcagccccgcctttccacaccgccgaacatgattgtcattctggcggatgacctgggttatggggatttgggctgtacaggttccaagcagataaaaacgccttcccttgaccggctggctagggagggggtgttttgttcccgggcgtatgtgacggctccgatgtgttctccctcccgcatgggactgctgacggggcgtttccccaagcgttacggcatcacgacgaatcccaatatccagatggattatcttccggagtcccactacgggctgccgcagacggagaaattgattccggagtatttggctccctgcgggtaccggagcgcggtattcggcaagtggcatcttggccacacgaagggatatacgccgccggagcgcggttttacgcattggtgggggttcctgggcggttcccggcattattttcccgtgaagaaagaagctgaaggcctgaatccctccatgattgtatccaattttacggataagacggacatcacctatttgacggacgacattacagaccgggcggttgaatttctgcaggaagccggaaaggataagaaaccgtttttcatgttcgtttcctacaacgccccccattggcccaatgaagccaaaccggaggatatcgccaaattcaggaacgtgcagaacggggaacgacgggtttattgcgccatggtatatgcgatggacaggggaataggacgcattctggatgccttgaaagcggacggtttggaaaaggataccatcgtcgtcttcctgtcggacaatggaggcgctccggaagcttcttcctgcaacgcccctttccggggtgccaagaggcagcattttgaaggaggtgttcgcgtaccttttattatcaggtatccggcggacaagcgtttggttcccggaagcgtttgcagacagcccgtttcctccgtggatttgcttcccgctttgctgaaggcgaatggccgtcacattcccaggaagctggacggcatggatattctggagctggtggggaacaagggagctcccgttccgcgcacctttttctggtgcacggattacacgtccgctgtgctggccggtgatatgaagtacctgctggtcccggatcgcgctccgcagttttacaatgtggcggacgatccccaggaacagagggatttgtatttttccaggcaccaggatgcggatcccctcgctaaaaagctgggaacatacctgactacgacgcctgcatgccgttttcccgacagtattagctggtccgccaaattgatgagggagtatgacaagactgcgccggacaggcagcctgagtaaggctgcgttggctttgttccgtattccgtcctgcatgccagcgtttgggaacctcctacggcgggagagggggaggaaccgcgtgcatggtttcctttttccgctgaaaaacgctttatttcaggcgcttgggttccgcaatgcggagaatgtgctctccgggaagggccaggttgcctttgtcccgggcaatcatttcaaagtagtggggatcctgtgagatccagatgaattcgttttttgcctgttccatctgctccctggatttttccagatgagcctgaaggaaggaacgttcatgctccagggagcgcagatccttccatggtttgaaacacaccagggaaagcagcatcgtcaggcacagggccaggacaatggcaaagaggcgcagggctctctggacgatcagggcacgtttctcccggcggatttcaagctccgccagggtaaaacggtggtagtagcggcgtctccagagcattccttgcagtcaaacaacatatttttgatcatagaatatgaattttaccaccataaactgcgtcatttcccagttcttcttcaattctaagcaattgattgtatttggccatgcggtcggaacggcttagagagccggttttgatttgccccgcgttcgtcgctacggcaatatccgcgatcgtggcgtcttccgtttccccggagcggtgggagatgatggcagagtatttgttatccttggccagttccaccgtatccagcgtttccgtcagggaacctatctggttgactttcaccaggacggcattcgctacatggcgggaaatgccctgattcaggaattccacattcgtcacgaacaggtcgtcccctaccagctgggtattgccgcccatggctttagttagctgttcccagcccagccagtcgttttccgcacagccgtcctcaatggaaatgatggggtattttttctggagttcctgatagtaagccgtcagttcctccgctgttctgcccaggccgtctgattttttgaagacgtacaggttccgggagggatcgtagaattcggaggaagccacgtccagggcaatgaagatatccgtgcccagggtgtacccggcccgttttacggcctgtgcaatgcattccagggcgtcgtctgctgatttcagggccggggcgaatcccccttcatcccccacggcagtggaaaggccgcggtcatgcagcacatccttgagcgcatggaaaacttccgccccgtagcgcagggattcccggaaagtgggagcccccttgggcatgatcatgaattcctgaaagtcgatgggggagtccgaatgggctccaccattgattatgttcatcatggggacgggcaaaaccttggcgttcggtccacccaggtatttgaaaaggggaaggttgagctgaatggcggcggcttttgccacggccagggagacgcccaggatggcgttggcccccaggcgggatttattgggcgtgccgtccaggtcgatcatgattttgtcaatggccggctgcagggtggcatcgtgccctgatatttccggggcaatgattttattgatgttttccacggctttaagcacgcccttgcctccgtagcgcttggcgtctccatcccggagttcccaggcttcatgttctccggtggaggctccgctggggacggatgcgcgtccgatagctcccccggcgagggccacgtccacttccacggtgggattgccccgtgagtcgatgatttcacggccgcggacgtcaatgatttccatttcattcatgatcataagatttctttttgtcctttttagacagggaaacaggctttcccgttccggagaagcatgtcatgtccctagaagttccggtttcaaaagcaggactgacgcagaacggggggacgaagcttgccggcttcttcagggccatgatgccccgcagaatgaagaggttcccttgctgggcatccgcctgcccgttcttaggaattttgccgggaagaagctcaggagaatctggcaggacaggatgtcggcgaggtgcgtggactctcaaaagggcaggagcagccgcttttacacggcggaaactgcggcagggggggaagctgcgccgtttcgtgacgcagggaaggacggcatgccggaacggggccttgattccgtcccgttccgggtatggaatgaggcgcttactattaaaaccatgcctaacattaacgataacttcctcaagttgcaggcgggatatttgttcccggaaatagggcgccgcgtgaatgcgtttgccgaatcccatccggaggcggccaaaaggctgattcgctgcggcatcggcgatgtgacggagccgcttcccatggcggctattgaagccatgcaccgggccgtggatgatttgtccactcatgaacgttttcacggctatgggccggagcaggggtatttctggctgagggaggcaatcgccaaaaaagcctatcaggcccacggcgtgcatgtggaagtggatgagatttacgtgtctgacggagccaaatgcgacacgggaaacattctggatattttcgggcccggcaacagaattgccgtgccggatccggtttatcccgtgtatgtggataccaatgtcatggccgggaataccgggagttccagcccggatggttcttatgaagggctggtgtatctgccgtgcactccggaaaataattttgtgccgcaattgcctgatgagcatgtggatttgatttacctgtgcttcccgaacaatcctaccggggccgtagcttcccggaatgaactgctgaaatgggtggaatacgcccgggcgaaccgtgccattatcctttatgattccgcttatgaggctttcatacaggattcttccattcccagatccatttttgaaattcccggcgcgcgggattgcgccattgagttccgttccttctccaagcaaggaggctttacaggggtgcgctgcggttatgtggtgattcccaaggaattgcacggatatgattccgaagggaacaaggtttctatcagccgactctggagccgccgcaccagcacgaaattcaacggcgcttcctatattgtccagcggggtgccgcggctttgttcaccatggagggcatggcccagactgccgcgctcatcagccattacctggggaatgcttcgcttctgctgaatgcctgccgtcaggcgggcatgcgcgtgtggggcggggaaaacgccccttatgtatgggtacagtgtccggacggtctggacagctggcaaatgtttgacaagatgctgcatgaggcgaatgtggttattacgcctggttccggttttggttccaggggggaagggttcttccgcatttccgcgtttaattcacgggaaaacgtggatgaagtctgccgccgcatccacagcctgtttgccagatagaagggcgttttcagacagatgtccaggccgcggtgcaaaacaccgcggcctgtgtatttctttccgggtgggttgatgaccgtggcattgtatttcctgccgggaggggagttcctgtaaaaaggtcatcttcctttcttacggatttggaccgggaaagagcagagtccgttttcaagtgatgggattccggtaaaggggcgtttctatggcatattcggcccttgcccccgttcatttgtacggagtaggttgttgcttatgtccccgtgggtgcgcatgagttcctttttccggcaggctgcttttcctgcatgttgcgcctgcctgctgtctgttgctggcaccatccgggggcaggaaggggaagcggagcttccttctgtggagccgctttcctgcgcgcactccccggatgggagggtaacagttcggggggcggttatgggtacggtgttcacggtgcgcgcttatcccgggagtggcatggacgcggaagaggcggagaagatttgcggggaggctctggcctgtgccgtccactgggaaaaagtaatgtccgccatggatgcggaaagcggtctggcccggcttaatgctgcggaatacggcatttccgtgcctgtttctccggaattggaaagggtgcttcttctggccctgaattatgcccggctgacaaacggtgcttttgatcccacgctggggccctgcattcgcctgtggaaaaagagccgccgccttggcgtcctcccgtccgatgaggaacgggaaggcgcgctccgggcatgcggatgggaaaagttgtccgtccgtaagggaatggcggtcaaggctgtttctggaatgaggctggatttgggaggcatgggcaagggctttgctgtggaccggatggcggagatgttgaaaacaaggggtgtatgttccttcttcattgacagtaccagcgatgttctggccggcgctcctcctcccggggaaccgggatggcggctgcgggtggatacaggaaaagggcagggggaagtgttgctgttgagccatgcggccgtttccacttccgggagcgcccggcagatggtgaaaattggcgggaaagcgtattcccacgtgcttgatccccgggcggggctgggcgttacggaagggtggcaggtgagcgtccaggcgtcttccgctgcgcttgcggatgccctggcgacggcagggtgtgtgatgcgtgaggaggagttccgttccctggtggccggattgccgggagtgtccgttccggccttttttcaaagtccgccatgttctgcggggaaaacgcagaaacaggatggactgcggaaggagggaggaatgggggcaatgaaaggaatggcaaagcaactacgtttttaaggtacacctttataaccctatttatgagattgtaccattttttactccctgccgttgtcagcgctgccgtatccgcatcatttggggcagagtttcctaatccctatcctgcgcctgttcccggtgttcgcctgactccagagattccgctttcaccctccattaatggcgcccgtatcgtcggggctacccccggctcccgcatgctgttccaggttcccgtctccggggagcggcccatgaaaattcaggcaacagggcttcccccaggcctgaagatggattcgcgcggattgattgcgggtaccgctccgtccgggaagagggaatacaaggtaaatatccaggcttccaacaggcatggaaaggatatgaaggagctgattctgaaggtgggggacgaattgtgcctgactccgcccatgggctggagcagctggtattcctacagtgaggctgtagggcaggataatgtgctgaagacggcacggctttttgtggaacgggggctggtcaatcatggctggacctatatcaacattgacgactgctggcagggcaggcgcggagggaagtatggcgccattcaacccaataagcgttttcctgacatgaaggccatgtgcgacgctattcacgccatgggcatgaaggtgggcatttattccacgccttggatgggaacgtatgccggttttatcggagggagcgcgcccaacgctaagtcggactacggggaaatggccattccggaaaaggagcgcaagcaggaggatcaaatctttggaagttatccgggagttcatcgcagaaaggcggatcatgtgggagccgtctggctgtttgaccgtgacgctaaacaatgggcggattgggggttcgattatgtgaaagtggattggaatcccaacgatgtgtctacgacaaagcgcatccgcaaggcgctggacgagtccgggagggatatcgtgctcagcctgtccaataccgccccgtacgaacatgtggaagagctgggcaagctggcgaatttatggcggacgacgggggatatccaggatcactggggcagcgtcagcggcatcggtttttcccaggaacgctggcagaagcatatgcgcccgggacattggaatgatccggacattctccagattgggaagctgggcaaacccaaccagcccaacaccacgtttgtccagacgcggctgactccggatgaacagtacacccatgtgaccctgtggtgcctgctgtccgctccgctcatcgtctcctgtgatttggagcatattgattcgtttacgatgggactgcttaccaatgatgaggtgatagcggtggatcaggatccggctgcccgtcccgcccgcaaagcgtggcaccaggggaatttccaggtgtggatgaaggagttgtccgacggttccgtggcggccggctttttcaataccgggaaggagaaaggaattttgaaggtgaatctgaaggagctggggctttccggagcgtatgaggcaagggacctctggaaacgcgctgaccaggggaccgtacagggagatatggcggtagaattgaacgggcatggagcatccatgttccggttcagcaaagagaagtaacgggaaggagacggctctgtattcattcaggggcggcggggatatgccgcccctgaagcctgtggcaggggaggcttttcattgaaccggcatccatagaaacaagccttctgcacaaaatcccacttttacagtacctgtcggcggattgtcggattccagggggcaggaggggcagtgaatgcctcccccgcaccagagcttgcgcttcaattccggaaagttttctccggcaggcctttgttattgtgtaataaaaaaaccgctccggcagatccggagcggttcttataaaagagattgatgtgacttgccttaatctctcccgacagcttttctaggcggcaatgccgaaatgctgctgaatggaggcgaaaatcttgtcgcgacgggcgcgggctttttcaatgtcacgggttttcagcgagaatctcaggcgttccgccgtggagtccggcttgtgaaccgtaacgtggcaccaccaaacccccctgttgttccacaggtggtggttggggttgtcatcattaattctaagagcaattttggtttgggctttcatctgtgtgatcttttccagtagaggacgtattgtttacgtccgttggcatattaatgtttcaataaaaccttcaacttggaggtgcctcacttaagcagatgatcccttgtctttttggacatctttttctgccagttgctcacctcgttgaagccttagagttcaagtggtggaacaacgttcaaaaaaagaatcttttttacaggagacctacttttttaagagtgttgtaagcaccgttcttgttgatcgtacgcagggccttggcggaaatcttcattttcacgaattgaccgagttcaggaacccagatgcgcttctcctgaaggttggggaaaacggtacgattgacagtcttagtgacgtgacgaccaataccgccctttttcttggcaagaccggagcgatggatacgacgacctttgtgaggcatggtacctctgatgatgcaaattcgggacatggcaatcgaagttatttgttaatgcgagagagataatctagcgtatttttgcctaaggtcaagaacaaccggacgaaagcactggaatttatcctggactgtacggaagcatgccttttcttttgtacgaattccggttttttctcccatgatgaagagaggctgcagagacggtgagctgaaagcgggagggggctgatccgggaagatgaacggtactgcagacaaagaggagaatgaggcgttcttccatatttttcaggacttccgctgtgggagcaggggctggacggatagccgggccggatgaaggcctttcatcgcaggaaaagtgcagaacacgggaaagattgccccctttgtttttttcacggcagcggcatatggctgcctacttccgggtaaaacgtatccggcgcttgcacgaaggggcgttccatgagaaattgaaagcatgagtgagaatcattatgcagagttttccgaatgcagcatgaggccccaggaagtgctggaatacgtttccggccccattcccgttctggaggagggagaagttctggtccggatgaaggcggctccgatcaacccggcggacatcaattttgtacagggagtttatggcctgaagcccgtgctgccgcactcccgcgccggcctggaaggctgcggcgtggtacaggaatctcgcgcagcgggatttcgagagggagatgaagtgattctcctgcgcggcgtgggttcctggagcgagtatgtggcggttccctccgtgaatgtcatgaagctcccggtgaaggtagatcccgcccaggcggccatgctgaaggtgaatcccctgaccgctctgcgcatgctggaagggttcgtttccctggaaccgggggattggctggtgcagaatgccgccaattccggagtgggaaggtgcattattcaactggcccgtgaaatgggcgtgaagacagtgaattttgtgagaaggccggatgaattgagggatgaattgactgcgctgggcgccgatctggtggtgggagaggatgacggggatgtggtgaagaatacgctggcccgcctggatggaaagaggcctgtgctggcttccaacgccgtgggcggggaaagcgccctgcgcttgatggatatgctggctcccggtggaagcatggtgacgtacggagccatgagccggaagagcatcaaggtgccgaacggttttctgattttcaagggtattaaactggagggcctgtgggtgacgcagtggcttaagaatgcccctgtttcagagattgaggccgcctatgagaaactggcgcgcctgatggcggacggcaggttgaagcaggctgtggataccgtttatccgctaagcgatgtgcggaaggctgtggagaaggcgcaggaggagttccgcagcggcaaggtggtgcttagcatggattgcgcctgatgcgtggaaagggagtttttgcgctttcccgtactgcggaatgctggaaggacgttttcagcgttccgtggttgggggcgttggctggcggcgtttttttgccgggagaatggtcttgctcaggaaacgggaagtaaggagttccgtaggagcgtagagccgggagggacggagcgtgcgcgccgtttggcttcagcccagcgtggaatcaagccaggtgttgagtatttctacggcggctacctggtcgatgacggggcggaagttttttgcctttttcccggcggcgtgcagtttttcctgcgcaatgacggtggtgaggcattcatccatgaagatcaggggaagtccggggagggctgcggccagttcccttccgaaagcgcgcaccttggccgcggcagttccttccgtgccgtccatgcggacgggaagacccagcaccagggtgcgtattccccgtttctggacgagctgaacaatgcgggaaattccgtccgtctgatgcctgtggatggtttctacgggatgggccatgatgcccacggggtccgtggcggcaatgccgatgcgggcttctccgtagtcgatgcccagggcggggtgcggactggtcatctgagttcgtccggcagctggttgacgattttcttgatttcgtccgccttgtttttatccgcaatgaggatggcgtccgccgtttccaccacaatcaggttttccactcccagcagggctacgtgcttgtctcctttctgggagaaaacaatgttgccggaggcgtcctgcacggtgatgtccgtgttggtggtatttttattgtgggtttccagatagttggctacggagatccaggatcctacatcgtcccagtcaaaggtggcttctatgttcagcactctgtccgcatgctccatgagcgcgaagtctatggaaatgggggtgagcgccggaaattcttcccgaatggtttcctgcggggccggagattcggcaacgtgttccacgaaggaggccagttccgggcagtgcttgtccagctgttcgcacacggcgggaatgctccagacgaacatgccggcattccagcagaaattgccccggctcaggtaggatgcggccgtggccgtgtccggtttttcgcggaattgaatgacttcacggcaggaacagcccggaacggattggatttcttctccgcgttcaatgtagccgtaggaggggcagggccaagtaggcttgatccccacagtgacaagcgctttttccctggcagccgtgtccatggcggctttcatcagggtgcggaaagattcctggtcctgaatgagctggtcggaggggatgacgagcatgactccgtgcggatccgccgccttgatgaggccgatgcccagggcgatggcgggagccgtgtcccggcgcacgggttcggaaatgatgttgtccacgggaatatcgtgggcctggcggcgcacttccgcttcctgcagatggttggtcaggataaagatgttttgccggggcaccagcccgtccagcctgtcgatggcctggcggaggagggttccttccccgaacatgttcaggagctgtttggggcggtggtcgcgggagaggggccagaaacgggtgccgctgccgccggccaggataagagcgtattggttcatgtctgtttcgcaggaatgggggttaaagaaaggtcagagcgctccgaaacggcgttttctgcgggagtagtccagcagagcggcttccatgtcccggtcgccaaagtccggccacaatgtgtccgtcacgtaaatttccgcgtagctgatctgccagagaagaaagttggagacgcgcatttctccggaggtgcggataagcaggtccggttccggcatgccggcggtgtccagatactcgccgaacaggtcttccgtcacggcatccggctggagctccccgcgggagactttttccgctattttcctggcggcggaggcaatttccccacggctgccgtaggaaatggccagaaccaggttgagcctggtgtttcccgaagtggcttccagactgtcctgaagaagtttccgggtgcgggcgggaagacgggaaaggtcgcctatggcatgaaggcgcacgcctttttccatcatttgatggagacgttttttcaggaattcgtgcagcaggagcattaacgcgtgcacttccgtcttcgggcggttccagttttccgaggaaaaagcgtaaagagtgagccagggaatattatgggtcatgcagaagtccgcacagcgctccaccgtatccgctcccgcccggtggcctgcctgccgcggcagatgacggctgttcgcccaacggccgttgccgtccatgatgcaggcgatgtgaatcggcagtttttccttgggaatggtaagcatagataggcgttgctcctttactctagtccatgaccggatccagttcaacacgcaagttgttcaggatgtattcctgtctttcccgcgtgtttttgcccatgtagaaggacagcaggtctttcaccttgtgggagtcttccagacggacgcggtccaggcgcatcccttccccgatgaaagccttgaattcctggggggagatttctcccaggcctttgaaccgggtaatttccgggtttttccccagcaggccgatggcttcctccctttctgcgtccgagtagcagtagatcgtttgctgtttgttgcgcacgcggaagaggggcgtctggaggatgaaaaggtgtccctcccgtatcaattccggaaagaactggatgaagaatgtcatcagcaggatacggatgtgcatgccgtcgtcatcagcgtccgtggcgatgaccactttgtcatagcgcagttcctccagcccgttttcaatgttcagggcatgctggaggaagttgaattcctcattttcatagacgactttacggctcatgccgaaggagttcagcggcttgccccgcagggagaaaacggcctgggtttctgcgtcgcgcgccgtcgtgatagagccggaggcggagatgccttccgtaatgaagagggtggtttccccggcgcgggagtgcttggagttgtaatgcacccggcagtcccggagatttttgttgtgaattttggccttgcgggcgttttcgcgcgccagtttctggatgccggagagttccttgcggtcccgttcggagtccttgatcttggcttccagagctttggccgtttccgggtttttgtgcaggtagttgtccagctccctggcaatgaagttgcccacaaaggtgcggatggtttccccttccgggctgatggtgttggaccccagcttggttttggtctgggattcgaagacgggttcctttaccttgatggagatggcggctacgagggaggagcggatgtcccctgcctcataattttttttgaagaagtccctcagggttttgacgatggcttcccggaacgccgcctggtgggtgcctccctgggtggtgtgctgcccgttgacgaaggagtagtgctcttccccgtattggccgccatgggtgaaggccacttcaatgtcatgcccttccagatggatgatagggtacaatggctcctcgctcatcgcttccgcaagcagatccagcaacccgtttttggagatgtagcggcggccgttgaaatgcagggccagccctttattgaggtaggagtagtatctgcacattttttcgatatactccggccggaattgcgtggccgcgggaaagatgtccggatccgcgtgaaacgccgtgcgggtgccgttgggttcctccgtggcgccgtccttgcgtcccttggggatttcctttccgcggcagaactggtaggaccgcgtctccccgtcgcggtaggcctggatttcaaagaagtcggacagggcattgaccgccttgatgcctactccgttgagacctacggattttttgaaggcatcgctgtcatatttggccccggtgttgatttttgcggcgcagtccagcagtttgcccagcgggatgccgcggccgaagtcgcgcacttcgcacaggccgtccggagtcacgtcaatggtgatttttttgccgaaccccatgacgaattcgtcgattgagttgtcgacgacttctttcagaaggacgtaaatgccgtcgtccggagaagcgccgtcacccagtttgccgatgtacatccccggacgcatgcggatgtgttccctccaatccagggttttgatgctgttttcgtcgtaggccatgtgcaacggggtcgcgcttattatagcggcgcccccggaatttgcgaagaaaaaatgaggggccgtccgtctgcgttcgatggagcttgacccggaggccgtcccttggtggaatccacggcgtatgatcagttgcaaggctccgtgcaaagtgaacgcttctctccgcattctgggaaagaggccggacggcttccatgaggtggataccgtgatgattcccctggatttgtgtgatgtgctggagtttttcccggcggcccgtctggaaatgagctgtgacgctccgggcgtgcctctggatgaaagcaacctggtcatgaaagcgggacgtctgatggagcgggagctgggaaggcccatgccgtggcatgtccgcctggtgaagaaggtgccccatggtgcggggctgggcggcggcagcagtgacgccgcatgcgtgctgcgcaccctcaatgagctggaacgcggaggtttgtcccgggagcgtctggcggagctgggcggggaaatcggttccgacgtggggtttttcatttatggcgcggcgagccgctgcaccgggcgcggggagaaggtggcgcctttgccggagtggaaggattggcgtcccaggattgtcttattgaagccgtcgtttggtgtttccacgccggacgcctaccgacgctgggccggttcccgggaattgcccggcattccctatggcgagcaggatgtagacggccatgtgctggtcaatgatctggaaaggcccgtgtttgaaaagcatttattcctggcggaaatgaagcgctggctggtggggcgccccggggtgcgcggcgccatgatgtccggttccggttccaccatgtttgccgtggtggaggatgaaggagccggacgcgcgctgatggaggatgccgcccgggagctggaccccactttatggatgtggtccggcctggtgatgcaggatgacgcgcggtaaaaacatgattccgcaggaggccttgccttgacggagggggatgcatgccgttacactccgtccatgattaagagtttgttggcaggcatgatggtggcggctgtatgcgccgtccaggccggtgaatatggggacagcgccgtccgggccgcccgggagctttccggggcggtgaagacgggcgacatgatgtggatgattgagaagatgtacccgcccatgaagaagcagcttgttgcttcctttccaggcggggaggcctccttcatggagaccatgagggaaaagatgcaggccgccgccgccgtgatgaaggaacgcggcatggtggtggagacgtatgaaataggccagcctgcggcggaacatctggtgaagggaggcggggaggtgctggtggtgcttcccacgcggatggtcatttccatgaagcgtccggacggggtgcccgtgaaggtggagaataccggtgttctggtgctggtgaaggatttgaaggataaggggccctggacgttcatcgacgcttccagaatgaatgcgaacggcttgcgctccatgttctatgacctgcctgaaaaggtgaatcttccgccggtttcttcccgccagcttcccgtgggccagtaaggggggcaggttcccacatatgaaggccgccggggaagagggcatggaaggcgtcagcgcttttgaggcttatgtccaccgggcatttgccccggacggattgttttcccgcgccagggattttgagtaccgggaggagcagcagagcatggccctggctgtggcgagggcgctccaggtggatgcgccgctgctggtggaggccggcacaggcgtgggcaaatccctggggtatttgctgccggcggtgaagtttgctttggattttgaccggaaggcggtgatttccacgcataccatcaatttgcaggagcagttgttcaacaaggatattccgctgctgcgcaccgccctggggattgatttttccgccgccctgctgaagggcaggcagaattacctgtgccatacccgcctgcggcgtgcgctggcgcagatggattccctctttacgcagggtgaggccgcggagttgaagaggatccaggactgggccctgagaacgcaggacggcaccctgagcgatatggcatttcggccgtcttccaaggtatgggccatggtctgcagcgaaccgcatgcgtgcagcatgcgccattgcggcccttcctgtccgtaccaggcagcccgcaagcgggttctggaggccaaagtagtggtgcttaaccataccctgtttttcgggctgatggcccaggcggaggattccgaggaggcggggttcgtgtttcccggggattttgtgattctggacgaggctcacatgattgagaacatcgccgcccgccagctaggcgtccagctctcggaaccgcatttgaattatgaattgctgcggatgtacaatccgcgcacgcacaaggggttgctgaaaccgctgaacaatccgtccctgtttcagcgggttcaggacgtgatggacgcctccggcctgtttttccagaatgcgcgggatgacctggggtttgctggttccggaaagattgtccgcattcttcagccggagtggtcgcaggatattctttctcagcctttgatggaactgatcggggaattgaaaacggagagggagaaacaggaggaaaacgcagccgcgaaggatgaactggcggatatggccgcccggatggaggaggcgcaggcttccctgaaggtgctgatggacatgacggaggaaggtcacgtatattgggcggagcgttccggtccggatggaaggaacatgagcgtttgctccgctcccgtggaggtgggagatattttgagggaacgcctgttttccgccggacgttccgccattctgacttccgccacgctggggaccggagatgcggacatgagttattttgcggggcgcgtaggggcggaaagcgttcggaagcttcagattggaagcccgttcaattaccgggagcagatgcggctgattgtagcccgttccatgccggagccggaccagccggagtatgcggaagttctgccggaatggattaaaaggtatctggcggagtcccgcggcagggctttcgtgctgttcaccagctatcggctgatggtccaggcggcggagaaagtgcgccctttttgcgaggaacagggctggacgctgtatgtgcaggggcaggatatgcagcggcatgccatgctggaggcgttccggaaggatgtggacagcgtgcttttcggaacggacagtttctggaccggggtggatgtgccgggagaatctctttccaacgttattgtcacgcgcctgccgtttgaagtgccggatcatccgcttgtggagtcccgctttgagagtatcagggaacgcggggggaatccgttttacgaatattccgtgcctgtagccattttgaagctgcggcagggggtagggcggctgatccgcaccaggagcgattccggcatggtggtgattcttgatccgcgcgtagctaccaagaggtatgggatgcgttttctcaagtccctgccggaagcccggctggagtttgtatgaggttttttcagaatgccccgaaattgttccgttgcctctcctgccgcatcaggaggtagctgaggggttgttccaggcgcgcttcttccagcagggagcggtccgcgaagatgtccggaacgggagcgtctgccaggatggagccgtctttcattacgatgcagcgcgtgcacagatccatgaccatgtccagatcatgggtagcaatgattttggtatgggtgaactggcgcaacaggctgatgagggtacggcgggaggcggggtccaggttggcgctcggttcgtccagcaccaggatgtccgggctcatggagaggaccgtggcgatggagacggcccgtttttcccctccggaaaggtgatgggtcattttgtctgccagggcttccgcgtgaacatcccgcagggcctgttccacgcggcggcggatttcctccggggggagtcccatattgagcggaccgaaagccacgtcttcccggacagtaggcatgaatagctggtcttccgcctgctggaagaccattcccacgctttcccggacgcgggcgacggttttgggggtcacgggaatgtcccctacccgtacctggccggaggagggagtcagcaaaccgttgaggtggagcagcagcgtggatttccccgcgccgttcccgcctacgacggcaacggattccccgtgggtgatgcgcagggagacgccgttcagcgccggaggggaatccgggtagctgaaacacaggtcaatggtttctacaaggtggtggctcatgggatgaggctgcgggcgcactggcccgcgagcatggtgatgttgaaacagcggaacagaatgatgagaacgcagaaaagaaggcctctcgctgcgccgcgtccggtgatgacgctgcgggaactgacgaattcagggtcttctccgcctctgcacaggacggcctggtaaatgcgttccgcccgcccgaatgtccgcagcaggagctgtccggccatagccccccacgtggaaagagggatgggcccggagcttccccgccgggagcggaaggccatcagcatatgttggcattcatccaccaggataaaggcgtaccggtacaggaaggccatcagcgtgatgagaatgcgcggggcgccgagctgcctcaggccgcggcagagaggcgcaaagccggtggaggccaacagggtgaaggcgcccaagatggtgagcatgcacctcaggatgatggagatgaaggaaatcatgccctgcgtgacggggatgccgaaccattctcccatgggagttctgtccaccagagggttgaagatgccgatcatgacggcgacgggcagcagccacagggcgcgtttcagaaggtagcccaggggaaggcccgccaggcggatgacgcagaccgggaacaggaagaaaggcaggagccccgtgatttcctgcggaggccaggaaaggacgcagatttgatagacgaggaaagctccgattttaatgcgggcgtccagacggtggatgccggtatttccgcaggaaaaccggtccatttggcggaattggcgcgaggcgtccgtaaaaagcggcatgggaagggtcagcgggggcagcggctgtgcggttttctgccgaacaggaaaccggccgcaaaaataagggctgcgataatggcgcttcccagcacgccggccatgctcgtttcagggttgacaatggaagaagcggattccgtttctgcggtgtttgccccgtcaccggcgggaaaggcgtaatccggcatgatggcggtggccgcctggacggtttccagactttgatggaggggggacggttccgccaatctggcttcttccgacccggtgacgccggctacagaccattccagtccgtcaggataggtggaggcgaaccaggagagggcggccccgcagagcagggccgctaccgcaaagatgcccaacacggtccaggatgcttttttggcggttccggtttccaaatcggccgggcgcagcagggatggctgtgccttgctgatgaagatgacgacggcggccgtagcaagcccttctacggcgccgatggccagatgaatgggcagcatcagttccacgaattgggcgaagggcagtgctgagatgccggaggccgttgtttccaggacgacggcgaaggctcccatctgaagcccgatgacggcggcggtgacgctggacagcgtaatacggcccgtgccggggtgtttgccggccaggggcctgtaaatgaaggggtaggccaccaggcaggagaagaagcccatgttgaagatgttgcagcccagggccagcagccctccgtccgcaaagaaaagcgcctgcaccgccaggatggccgccatgaccagaaaacccgcatacggtcccaaaagaatcgccaggatgaggccgcctcccagatggccgctggatccggtgcccggaatggtgaaattcagcatctggcaggcgaagatgaaggcccccagcacgcccatgagcgggacgagccgcatttctttttcctgcctgactttgcgcgcgcagagcattgtcattgcagcggaagccgcccacatggtacagcctgccgccggtgagatgaagccgtccgccatatgcatgatgttgatgcctttctattggatgaaatgaagtattgctggccccggaccgggcaggttggcgccactttagcataaacgccgcaaagccgaagaaggaaatgcggcaacggaggaaagtgtgtgcatcaggcggcaattctgctgccgcccatgccgggcaaaagatgcggacgggttgggcgtgatgcaggcgggaaaactgtctgctagacgggacccatgatgaatttttccatagccaagtgtttgttttccatagggggatgcacgacgatcctgggcaatatttccgcagacacggccgtgtcttccgccggagccatcggaggcctgggcgttctgacgattgccgtgaactatacgctgaatctgctcaaaaagaaggatgaacagttgatggcgaaggatgcccgcattgaagccctgatggaccgcctgatggacaaatgcccgaattgcgagctggcgaaggcggccaacaagtccctgctggacgatgaatgacggcagccgcggggagggggggggcttatctcccgtccgcgtccggcatgcgggtgtacgtctcccgggttccgtccgtgtccagaatcagcgtgtttctgctgaggcggtcaatggtggaggtagcggtgaagagggaggaattgccgtttcccatgcttttccctgtcagggtcaggcggttgccgtccagctgccagctttggtagagaagcgtgtgcatgttgatggagacggccctgccgtccggcaggagccgcattccctgcacgttcccgggctgtccggggacgggctgggtccaggagccggagaggctggcgggagtgggctgcatggaacaggatgccgccagcagggacagggccgggagaaagaaggaaaatctcatggcggggaagttcagcgttgttcacggatgatttccgtgccgatgccgtccggagtgaaaatttccagcagcagggtatggggcaggcgtccgtcaatgaaatgcactttgcgcacgcccgcgttcagggcgtcaatggcggagtggattttgggaatcatgccgccggacacggtgccgtccttgatgaggtcgagggcttccgtacgcgtgacggatttaatgagggtggagggatccgaagggtctttcatgattccggggacatcggagatatagataagcttcaccggcttgagttccttggccagggcggctgccgccaggtctgcgttcacattgagcggtttatgggttcccagctcttttgccagcggagagacgatgggggtgatctgaagttccagcgcttccgtgatgcgctccgtcaggcaaccgatgacgttgcccacttcaccgatatctatggggttgccctgttcatctttttcatggatgcgttcccctacgaagatttccgtgccggggatgcctacgcccttgccgccgtaatcgcggaacatttggaccaggccgggattgatggttccggagagggtgcgttccacgatggaaatggcttccggagtcgtgacgcggagcccgttgacgaaacgggcttccagccccgcctccgccatcgccttggaaatggctttgcctccgccgtggacgatcacggggttgaagcccaggacctccagcagaacgatgtcccgcatgagcttcttgaccaggcgggcgtcatccatggcgctgccgccgaatttaatgaggaatgttttgtccctgtaggcctggaggtaggggagggcgccgacaatgacggaggcctgttcaatcaggcgggtgattttggagtccatgtcaataatgaaacggtaggagttttaacggaaggagagggagatgttgaagcaggccccgttcaaagcaggcgcctgcttctgaagtaaaccaggggaagaatgatggaaacgagcatgaccaccagggagatgtagtagccgtattcgttttccaggccgggcatgtgggcgaagttcatgccgtaaatgctggcgatcagagtgggaggcataaagaccacggccgccacggtgaagattttaacgatttcgttctgttcgatgttgatgaggcccagaacggcgtccagcatgaagttgacgttgctggaaagaaagttggcgtattcggaaagggaggtgacgtcacggctcagagggcgcagcttgatgtacagcgtggagttggtgtcgtccagagcctcttcattgctggcgtacgtgagcaggcgcagaaggttgaccaggcagtcccgctggcgggtgagcaggtcgcccacgcggcccagatcctggagcgtcaggcgcagggcgctggagacgggcacacgcttgctggattttccctcaggttcgtcccggcggaaaatgtttttggaaaggcggtccagttccgcgccgaaacgttccagcacgtccgcctgccggtccacaatggtttccagaagaccggtgaaaacctggtcccggctgatctgcttctggcgcaggagctggtgggaaaaaacgcggaaggaataggagtccgaatggcggatggtgatgattttagcccccatgaggacgaaggtgatttccgacagggagggggattccgtatccacccggctgagaaccgtggtggtcatgaagcgcgccccgtcttccgtgtagagacggctggtggcctcaatctcccgcatctcgtcataggtcggcatttccagcccgcagaggcgttccacaaacttgatttccgccggttccggggtaaggaggtcaatccagaagacggaatccaagtgctgttccgccgcatccacctgggtggtgcgctcaatgccttccggggtttgacgatagagccggatcatgccgttgatttaggtggggggatggaacgatgccgcgcatgaggtcgagtgacgcccaacgcgggcatgatgccttgtttgtacagggaagggaagtaaaaagggtgacaaaaagaggcccggtccccaggatgggaaccgggcctgccggaaaagggatgcgcgcctcttaggcgttttccttgacgaccaccttgagcgtggcttccacctggggatgcaccttgatgacgacttcgtgttcgccttcgctcttgatcggtttttcgagttcaatagcccggcggtccacttccactccctgagcggtcagggcatcgtgaatgttctggttggtgatggcgccgaacgccttgccgccctggcccacttcaagagtgaggtctacggtcagtccgctgatcttggcggccacttcctgagcggcgctgagttcttccgcttcgcgcttggcgcgagcggcctgaagattggcgatgaaacggcggttggaagccgttgcttcgtgggccagacccttgggaatgaggtagttgcggccatagccagccttaacggtcaccaggtcggcttctgcgccgagcccttcaatttttgttgcgagaattacttccatcgttgccatggctaaaaagaaatggttatttgtgagcggttgaagtagtaagtattcgcccgaatgtcaagacaagagcgataaaaagggcgtttttttatgttttgagaggaaaaatcctcccggttgtcatgattggtgacattgcgcttgcttcacgcggcagtagtatgtagggaaaggaaccgcatttatcgcgttccctcccggaggggtggggcgcccgcgggtacattacagatatttgatcttatggctattcagcgcgcattgatatccgtttccgacaagacgggcctggaggggtttgccaagggcctgcatgagtttggagtagagcttatttccactggcgggaccgccgccttcctgaaaggcctgggccttccggtgattgagatttccgactataccggagagcctgagttgtttgaagggcgcctgaagacgctgcatcccatggtgcacgggggcctgctgcaccgccgcgacaatgaggaacatgtgcgccaggccaaggaaaacggcatcaagcccatcgacctggtttgcgtgaatctgtatccttttgaagaaaccgtcgccaggcccggagtcacgctggaggaagcgattgaaaagatagatatcggcgggccgtccatgctccgttccgccgccaagaattacgcttccgtcacagtggtttcggaccccgcggattacgcgcgcattctggatgaaatgcagacccacaagggggacacgaccctgaaaacccgtgaaaacctggcggtgaaggtgtttatgcgcacctccaattacgataacgccatcacgaattatcttggccaccagagcgcggaaagcaccaagggcagcttctgcatctgcgctcccctgtatcaggaattgcgttacggggacaacccccaccaggaagccagcctgtacggcagcttcggggacattttccaccagctccagggcaaggagctttcctatacgaacgtgctggacattgaaggggccgccgagctgattacccagttccgccgcccgacggtgggcattttgaagcacacgaacccctgcggcgtgggccaggacgacgaagacctgcgcaacgcatggcagaaggcttttgaaacggatacgcaggcccccttcggcggcgtgatcgtggtcaaccgcccgatgacggagggcctggcccgtgtgctgagcgccattttcacggatgtcatcatcgctccggaatatgatgcggaagcccgcgccattctccagaaaaagaaaaattgccgcatcatccgcatgaacacggaagcctggatgcaggcgcgccgcgaacccatcatccgttccgcgcccggcggattcatgaccatgaagcgggatacggacgtgatgggtctggacaatctggaggccaaggtgatgaccaagcgccccccgaccgaggaagaattgaccgccatgcgtttcaactggcgcgtcgtgaagcaggttcattccaacgccatcgtttttggcggcacggaccgcacgcttggcatcggcgccgggcagatgagccgtgtggattccgcccgcattgccgtctggaaggccggacaggccggactggatctgaaaggcagcgttgtagcgtctgacgccatgttcccgtttgcggacggcctccaggtcgccattgacgccggagccaccgcctgcatccagcccggaggctccatccgcgacgaggaagtgattgccgccgctgacgccgcgggaattgccatggtatttacgggacaccggcatttcctccattaatttgaatgttcgtccccgtccctttgtcttaaaaccgatatgctgctaggtgtaaatatagaccacatcgccacattgaggcaggcccgctatgcgaccatgctggattccttcaatgtggagccgagtgttttggacgccgcttatgcggcgcaaaggggcggggcggattccatcaccctccatgtccggggcgaccgccgccacatgcaggatgcggatgccctgagcgtccgggagagcgtggcccttcccctgaacctggaaatgggaaataccccggagatggtggattttgccctgcggctgaaaccggactatatctgcatggttccggagaagcgcgaggaaatcactacggaaggcggcctggacgccgtttttcatgaaaaggatctggctccaaccatggcaagaatggccgacaacggcattcaggtgagcctgttcattgatccggaagtgccccaggtggaggctgccgcccgcctgggcgcccccatgattgagttgcataccggatgttttgccaaccattccggcagggagcgcacggaggaactggcccgtttgaaacgcgccgcggaactggcccattccctgggcatccaggtgaatgcgggccatggcatcaattaccagaatctggaacagctgctggctggcgtcccttgcctgcatgagctgaacatcggccatacgattgtatcccgcgctctttttgtggggatggagcaggccgtgagggaaatgcgccaggcgattgaccgcctgagctgattgtgccgtttcaattgatcccggttgccagagtatgagccgcattgcaggattgggaatggatttggcggatatggaacgcgtacgccaggccctgcggaaaaacggggaggcgtttgcgttgcgcatctgcacccctgatgagtgggcttattgccggaagcacgcggatcccgtgccgcatctggcggcgcgctttgcggccaaggaggccgtggcgaaagccctgggaacgggaatcggggcgaagtgcgcttttacgggtgtggaggtggtgcgcggcgatgcgggagttccttccattcttttgcacggggctgcgggagtgaccgcccgggagctgggcattacgggctggttcctgaccatgacccattccaggttgagcgccgccgccaccgttattgccttggcgcaataaaaaagccgttccctgggaagaaaggaacggctggcattaaaggaggaaagggaagttattttctccttctgcgtgcggcaaatcccgcgaacgcaagcagagacaatgccgctgtggagggttccggaacagcggcataagagacggagagcgaactcagtttcgtgccgttcaagccgtcattattccaaccgggagcacgatgtccaatgctgtacatctcgttttgggtatctcctccgtcatcagttccggtgtaccaggcgatatcgctgatagaaacggttgcggtgctggcagcagtaccattatcaagagtaacggttacgtcatgtcccaggatatcaacggttacgtttgtccacgtatttgccgtcagtccggcttctgcgattgctcttccggaggagagattgccggagttgatggcaacagccccattgctgagtcccaggctgaagccgaatccgctgcgggcaacgtgaatgatattctcaagggaattgttgcctccccatgagatgtccatggtgatgctcatggtcccctccccggaaagggctccgttcagcatttcccggaatacatttataccgcgttcgtcaaaggtggaaccggtaagaaccgtccccttctctgtatcttgggcagtattgaaattacctgtagcagttccccccatgacggcagccgcggaggaaaaatcccatgtataggtagctgtctccgccgcctttgccgcaccacagaaaagcagccctgctgccagcagcaaatattttttaatggatagattgatagccatatgacaatagcacgtaattgcaaaaagattcaacgattttcaaattcgttgctatggaataaaagaggccgccctgtcaaagggcggcctctgccttaagagttttttcttaagtcaggtggacttttaagaaaagctcttaatgaggagctggcgctgttcttccagttcggccgggagcttcttgcccaccttgtcgaacagttcggtctggctttccagttccgcctgccattcgctcgggttgagagccatgttggcgttgaactgttcttcactgtagtcgaggcccgtcttatccagttcggcataggtcggggagacgcccagcacggtcttctggccttcagccttgcccttggcgcggcgcaggatccagtcgagaacgcgcatgttgtcgccgtagcccggccagatgaagttgccgtccttgtccttgcggaaccagttcacgttgaagatcagcggaggattggcaacggtcttgcccatgtccagccagtgctgccagtagtcgcccacatggtagccgatgaagggaagcatggccatcgggtcgcggcggacctgaccgatgttgccgaaggcggcggcggtcatttcggaacccatcgtcgcgccgacgtaaacgccgtgcgtccagtcgcgggactggaagacaaggggcatggtggtggcgcggcggccgccgaacaggatcgcggagagggaaacgccttccgggttctgccattcgggatcgatcgtcgggcactgggaggcgggggcggtgaaacgggcgttcggatgagcgcacttgcgtccgcaatccggggtccagtcattgccctgccagtcaatggcgtgggcgggagcggggccgtccatgccttcccaccagacgtcgccgtcgtcggtcaggccaacgttggtgaagatgacgttttccttgatggtgtccatggcgatcgggttcgtcttgtaggacgtgccgggagccacgccgaagtagccgttttccgggttgatggcatggaaggtgccgtcttcatgaggccagatccaggcgatgtcgtcaccgatgatggaggttttccagccggcttcccggtaggaggcggggggaacgagcatggccaggttggtcttgccgcaggcggacgggaatgcgccgccgacgtaggccttggtgccgtccggggattcaatgcccagaaggagcatgtgttcagccatccacttgttcttgcgggcgatggcggaggcgatgcgcagggccaggcactttttgccgagcagggcgttgccgccgtaaccggaaccgaaggaccagatttcttccgtttccgggaaatggcagatgtacttttcttcgttgcagggccacggcacgtccacctggccgtctgcaagcggagcgcccacggtgtgaaggcagggaacgaatgttccgtaaccgtcacgcttcgggttgccgccgcccttgacttcgtcttccaggcgcttgagaacctgttcacccatcttggtcatgatgcgcatgttggtcacgacatagggagagtccgtgatttcaatgccgatcttggccaggggggagtccaggggacccatgcagaagggaatcacgtacatggtacggcctttcatgcagccattgaagaggcccttcagtttggccttcatttcaacgggatcggcccagtggttggtcgggccggcgtcttcttccttctcgctgcagatgaacgtgcggtcttccacacgggctacatcggagggggtggaacgggcgaggaagcacccggggcgcttctcggggttcagtttgataaaggtgcccttttctaccatcatgttgcaaagctcgtcattttcttcctgagagccgttgcaccagtagatggagtcgggttggcaaagctgggcgatttcttcgacccacttcttagctgcttcgtgagtggtactcatggtgaagatagtgtatgcacggaaatagccgttggcaagcctcccgtgcggctttttatggggcggttttgtttcttcgggcatggaaaccgcgtgcggggaaaggcgttgccctgattgccggatggctgtgcgcgggggcttttttcaggatatccctttttcctggcgccgtgttccggaaagggtgaaaaagactgttttgactggaaatctgcttgccagctcgcccgcgatagtctagggaagaatcatgaatgttagaatgttgtcggcaaatgcggtgtttctgatgctgccggctttgctggcggcgtgttcggacgccccgcgcccgcccgccgtcagcttcaggattcagaatgtgcctcccgtgccgcgcacgatgtcccagatgtccagagaggtgcacattaaccgtgatttcatgtccccgcgctcccgtgcgcgccgtgccgcccattccatgcatcctcggtttatcacgattcacagcactgctaatcccaagggtgatgccgcggcgcatgcccgggcattgaaaaggggggccatggggtccctgaactggcattttacggtggaccagtaccgtgccgtccagcatattccactgaatgagacgggccgccacgcagaccggggcggtcccggagacatgtactccatcggcattgagatgggggaggtaaggagccataaccccgttgttacctggaaccgctccgccaagctgacggcagtgctgatgaagcagtaccatattccgctccgtaatgtggttccccattattactggacgggcaagaattgtccggccccgctgctgaccaacggccgcccggggcataaatggagctggttcatttcccgcgtggattattacaggcgctgtctggagacgcgtcccgccgcagcgctctgacgggtacgcgcgcatggtgcatgataagggatacgttcttgggttcatggctggagaattgcttttaacgtcttctctggaggaatgcgtttttatccgtcccagagagttggcggccatgcaggcggcgggaattgcctccgtacgggatttgttgttcatgcttccgcgcaggtatgaagaccgccgcatgtttgaccgctatgattccctgtcttccggtgtgcccgtctgcctgagagggagggtggtggatgtgggctggaaaggctggggcggacggggcggcaagggccgtggccggtatgtggaagccgtgctggtggatgagcagtctttggggcaggcccgtttttcctgcctgtggttcagcatgccgggcgtagccaggatgctgtgcgccgggcaggagatgattgtgtacgggcgcatgaaaccgtatgggaaaaagctcagcatggtgcatccggattttgaaattatccgggaaggtgatgagcagtccattcatttgaaccgcattgtccccgtgtatggcggccgcatggggattgcggtccgcaggctgcgggaaatcgtatgggagacgctgtccaggctttctccggctccggaaccggaggtgtatgagtttgtgccggacactccgtgcaaaacggcattgaaggatcttcattttcctgagaccgcagaggcccgggaccgggcgcggcgccgttttgcgttggaggaatgcctggctcagcagttgaacgtggcctacaggagaaggcgggcggatgaagtgcccggcatgcggaccgcaggttccagccatttggtgaaggatctggcggattccctgccgtttgagctgacggaggctcagaagcgttgcgtgagggagatttaccgggatatgaaagccccccgttccatgaaccgcctgcttcagggggatgtcgggtccggaaagacgctggtggctctgtgcgccatgctgctggctgtggaacacggttattccgccgtgatgatggcgcccacgcagattctggcggaacagcattatctgaagttccggcagatgctggacaagctggatgtgcctgtttccctggtgacggcggacaggaaggaggaatcccacgtgtcgttcgggaagcagggagggattgtggtcggcacgcatgccttgctgtacgggaaaaatgtgccggagcgtgtggggctggtcgtgattgacgaacagcacaaattcggcgtgaatcagcgggagaagctgattgaccggggagagcgccccgacgtgctggtgatgaccgctacccccataccccgcacgctgacgttgactttttacggggagcttgacgtttccattctggatggcgtgcccggagggcgcggggccgtcgtgacggccatccgcacggaaaaggataaggaaaaagtgctggcattcgttcggaaccagctggaggaagggaggcagatttacgtggtttcccacctgattgacggagaggattcccggaaggggaaagccgtgacgaaggaatgggacgagtggaaggctctgctgcctcatgtggatgtggggctgctgcacggcaggatgtcttcagaggaaaaggaggcggtaatgaaggacttccgctccaaccgcatcagcgtgctggtgtccaccacagtggtggaggtgggggtggatgttccgaatgccacggtgatgatcatcaataatgcggaaagcttcgggctttcccagcttcatcagctccgggggcgcatcggccgcgggtcgcacaagtcctactgcattttgatgacggacgcccgtccggaggatgagcaatgggagaagctgcgcatcgtggaaactacgacgaatggatttgacctggcggaacaggatttgaggctgcgcggccctggagacgtgctgggtacgtcccagagcggcctgaagggcgtacgttttgaggaatggctgctggatgcgcgcctgattcaccgtgggcggcagctggcggaggctattctggcggaagatcccaatctggaatccgccaaataccgccctctccgttttttgctggaagacggggcggggaggcgtgtggccgggtaagattgtttttctaccgtttgctgacggtcagcttgtaagaggagcatgacagataagagggcaacgatttatctgccggaatgcgtctaaagaggcaaagaagatgtttcttcttcaacccgaacaccgataaaacaatgattcaaacgtatcaagtactccctgtggtggccatcgtatgctccgcctccgcctttgcccagaacgctgccgatcccgtgcagatggtcaagcagaatatcgacctgatttcttccgccaacaaggttttggacgacgtgaaggacaacgctgcggttgaaatcgccatcaagcagctcaatgcgttgactcagcaggccaagcagctggacaagtccatggaaaagatgaagcttacttccgagcaggctatccgcatcaccaaattgaacggagacgcccaggacaccatcgtggacatgctggaaaattgcgagcgcattcaaaaggacaagctgatgactccggctttgctcaaggcggtgaatgattttgccgacgccgccaacatcgacgtggtggaaacgattacgaccgtggagcaaattgtggaagattgagtgaccagcttatcaaaagacctttgactggtaaggccgcctcctgaagaaggcggccttattctttaatgaagggccgttttttgtcaatttccgggcagggtgttgcatttctccatggccggattggggtttcctgccggaaccaggtagcccgtgccgggagacgtgcccaggcaggagaggagatcctggtggcgtggcagggatttggcgcggaaaacggctgcggcggggtccagcacattgccgaaggtgatggctcccatcgggcatgcgagctggcaggccgtttgagccgccccgtccggaagcagcatgtcttgatccgtcacatggatggaggtggatggctggcccggatgctctttcatcaagcgggatttgtgccggattttggcacgttccaccatttggacgcagtaggtgcatttttccatgacgccgcgggagcgaacggttacattgggattgcgctgaaggcgcgtggcccgttccgatgttttggcgtaatcaaaaaaattgaaacgccgtgctttgtacgggcagttggtggcgcagtaccgggtaccccagcaccgggcgtacaccatggcgttcaggccttccgtagtatgcacggtggcattgacggggcatacggattcgcatggggccttgccgcactgctggcaggccacggggatggaggtgagcgtcccttcctccgtgaagtacctgtcgatgcgtatccagtccagggcgcggcccctggccatctggtcacgccccaccacgggaatgttattttccgcgcggcatgcaatcatgcaggcgttgcagccgatgcaacgggacgtgtcaatggccattttccactggtaaacggcatccgcgccgggagggggaggcgggacgcgggacggaccgggatgcagggagaacggggcaggctgcacaacggggctctgaatggcttccgtccgctcccggagggcagacaaggcaatctgttccggggcaatgccgtatgtttccgttttttccacctgtctgcggagttcatatccgccggaattttcctgcctttccgctacgtggttgatgccgccataacccagaggaagaataatgagattatccgccactcccggaatggggcacaggatgacttccatttgcgtggagggggcggtaagcgtgcagtgcatgggcccggaatccgaacctcccagccgcagaaaggtggcgggggaaacctgtgcggacgccgcccagctgacgcctgttattgggtccgggcattcctgcatccatgcattgcgtttccagcgcccgtccccaatggaatagtccgggcagaattgcagttccagcatcccgttttcctgtttttccccgctgccgctgaaagatgctgcgggcgtttgcatcatggcggtttcaagagccgtttcttcctgcgggaacaggggagcataggccgtttcttccgaataaccgcgctgaagcgcctgagcccaggccgcagttttattttccggattcacggcgcgttcaaagcatttgcgtgctctgtggtaaacgggagagaggtgggtgggggaattgtccgctgtggagagatggcctttggaggaaagcaggccggaaagaacttcttccggagaaatgcccccgtacaggggaagaatgacgggctggcgatagcaaaatctgccctggtaatcccgctccactccccatgattccagaaagtgggctgccggcaggtgccagcggcagacgcgggaggtttcatcttcatacattccaaggtggatgctttccactttgttcagggcttccgacagtccggaactgcgcccggaatccagcacgggatttcccgcatccagtaaaaaaacgatttccacctttttcccccggatgtcccgaacaagatcgtccagcgcgccataaggggttgggcgcggagcctttaacaactggatgcatgttcccatggagccgagaagacagttgagcttccagacaatgccggataattccggatgattgtcccccaggaggacaacgctttctccggggtggctgaataagtcatccgcacagtggcgaagccagttgagttccttttctgtcaggggatggtccgtttgccggggagggggaagcgtttggccggagttttttttgctggaaagatagcggaacagttcctccaggaaaaacgccaggcgtgcaggggaaacgggcagtctgtggtcggcatgggccccggtcagggaaacgcggccctccacggcgtaaaggcgtgttcggttcctgttttcttctttgtagtaaagcccttccggggagcgggacgcaatgaagtcgcgcgtgtttccataggggttttgatgaagaaaatcgcaatccagggagaggatgtgcctggcgcgcgcaaaacgcacgcggaaccgtacttcttccggcagccccgcctgcatgccggaacccggttcaggcacgggggaataccggtagatgcgcacgagtgaatttttcctggtgatttcctccagcatggaatggagcagaggagaagtcgaggggggaagaagaaggccgatgccgccaccattccgaagattgcgggaccaagaagaaaaggctccccggaattcgtcttcggaggccggcttgccgttgaacaggatatgcttgctgcggccggggtcgtaaaggtccagaatggaggcctgagccgcagccggcagccccgggccttccgggtattgcagggagggaatcaatttgacggggcgcccttcataacaggcggccagtacgggttgcgcgtttcctcccatggtcaggcaggtggcgtaagccgtttccacgccgggaacagaccattcaggcccttcgttatagggaaccaggtatttttccacacggcggcaggccggcagccctatccccgccagggctgcccctgcacccatccatttcatgaaggaacgccgcgtcatcccccgttcttcttccggaagaaaagcggggtggttctggggaacttcattctgggaaaatggagggaggggagtcaaaccgggtaatgatggggattgatgaaacagggatggctttttttaggaaatccgaaggatgaaatcaagtggtgattgacggcggcctttatctccgggccaataacggataaacagggaacaggaggaaatctttcttgtggaattcaatgtcattgattacggattcaaggaaggaatcatttaatgaaaagccctttggtctttttatgacgcagcatccgggaacgcaaagaggaataactttggagccgcggatgtcaaacaggccatggaggtcagtgatggcatgcggtgcaatccgtcttcggctgaatggtccattggcgtttcaggaaatttcccagttgaagcggggtttggatgctttttccttcttcatcccggatggaatgcgtgcggaggtaatctgcggcggaataatgggaactggccgtttcttccagcgggcgcaggtggggagccggattgcggtggcagtccagacaccattgcatgcgggcgtcgcgtggagccctgatgcgttccatgcccgccacgtctccatggcaggacgtgcagccgatgccccggttcaggtgggccatgtggttaaaataggcgtgaccggacaggcggttgaccatcacccagcggaccggttctcctgtgtaaccggggtattgcgggtccgccgcctccctcaggggggcgatgagcggactgtccggaagaatatgctggtggcagcccagacaggacttcgtatccggaatgccggctctgggtgagcgctgtgcggcgctatggcaagccgtgcagctcatcttcagatctccggcgtgaagtttgtgggaaaagcggacgggctgcatgggttcatactccggaatactgaaattaacataatatattcctcccagtacgaatgcggcagcgagcgcaaccagggcggcaatcccgtaaaagcgcttgttggtattgggtggaaagatgttggccatgaaccgtagagtgaaagggctggaacctccgtcaggccgttctgcccgggcgcgggatgcgggcgggcggcaggggcgtatccatcgtcaggtcttcaggcatcagccgtgcggtactcttcttaatctgttcccaggtaatgcgctggcctgtgtgggccgcttcacgccccatgatggcagccagggtcttattggccgcgctttccagtgtctgggtccaggtgccggagcgcaggaaacggtaaaaggccacatgcgtgtctgcgtacatattgccgcgttccccgcggaaacgccagcggttattcgcctggatgtaggggcggtagggagtaaccagcattcctttttcgcaaatggtgcggtccacgatttccccgtggcagccaacccactgtctgcatgaaatgtgggccgttacgttatggtcgtactcaaaataaacgtcgtaatgatcccatacgtcgccgtcatcccggcgctgagcgcgtcctccggagccgaaagccgccagaggaagctgctcgttcatggaccagaccatgccgtcaatcgtatggacgatttgttccacaaactggcctccgctcagccagttccatgcggtccagttgcgtagcgcccatgccacgtccgtatcggaggaaggtcgggagtccagggccagcggagacttgggaggagtggtgtaatataacccgtcaaaggagaggacatggcccagcagcccggaagaaagcttgcggtgggcttcctcattcgccttgtcgtagcgccagcagaagccgtccagaatcaccagatttttgagttttgccagccgtgcggattccagcacggaaagcacgccgggaacgtccaccgctacgggtttttccgcataaatatgtttgctggcgtcaatggccgccgccagatgttccggacggaaagcggggggagtgcagagcagcaccacgtcaatatccgtttgcagcaatctcttgtaactgtccaggccgctgaacagacggcttctgtccagctgggctcggttgccgtactgttccgccagtaatttggcgccgaaatcgatacgttcctgaaacacgtccgccagcgcccagaccatggttccgggatcggcgtccagcgcattcttcatggcgcccaggccgcggcctccgcagcctaccaggcccaccttgagcggttttgtgtccgtaaaaacctcagcggcgttcagacagggcatggctgccagaaacccggccgttcccgcggcggttttcaaaaaacggcgtctgttccaaatagggtaacccatctcaggggaattatacggtgacgtcctgtgaaatcaaacgtcgtattgaaatggtgacacaaaaaataggcgcaaccgtcattctcggaaatggtgctctgcggagggagtcaatgaactccctatattttgcctattaaatgggaagggctgtttcctgcgttcagaacgagaggcagaggttaaagagatatgttgcctgaaaaacagtttttaaggataaaaactgatttgactccggaatcctcagtgttcatgatgaattcaatgaggcctccggcttttcaaccaaccatcatgatgaagcgaaatctcattccttttacggcgtttttggcggcgttagtgtttgttgcctgtgacggcggcaagaagcaggatcatccccgggatgtttcggttcccagcgaacaggccgttcctaaaactccgggagaaaaaattctggccgttctgctgcttattcaggatcaggctacggcaaacgcccacgcggcggaggtgaaagagctggctgcctccctgcccggggatattcccaatgaagaagccgtaaatattgcaaatgaattgatgcgtctggccagccgggagtgttatggttcttcgtctctggaagatgctttgaaaggaattcatttcgataccggggaatacacgggcagtgtgcctctggatgtggatggatttgaacctaccgcggaagagccgtaaaaataaattccccgtgccgggaattgggtaattactacaatgttcctcttcattccgttttgccggaatgaagggcggtttgatatggtatcaggtcccccggtaaatcctttcctcttcctgatgggaaaatgcgcgaagagaaggggaaaatatctgtacagcccgactcccggagttttcttgctagagaacaaagggccacgggtggtaaactcaatccagggggcggcgcaattcttcaatggcttccgccatatcttcccgagtaattttcgtagaaatgcctgcctcccctgctttggaaagcagaacaaagcggatggttccggcccggaactttttgtctgatgccgttttttgaagaacagttgccgtatcaatgccgtccggaagaaccaagggaagttccagcgcctgaagcgtgcgaaggatcttgttggcatcggaagaacttaaaccggctttccgttcactcagaaacagggcggcgcgcatgccgagcgccactgcttccccgtgaaggatggttccgtaagggacggcaacttcaatgccgtggccgatggtgtggccgaaattgagcagagcccggatatccagagtttccaattcatcattttctacaatgcgggccttaatggccacgttccgggagattaggtcaggaagcctggcaatagtattcagggagaagccgatggagagttccggccccagccctttcaattcatgaagcatggaagcgtctttgatagctgcgtgcttgacggcttccgccaaaccttccgccagcgtacgtcgatccaaagtcaccagcgtggtagggtcgattaccacgacggacggctgatgaaaggctcctacaagatttttcccttctggaatattgacggcagtctttcctcctacggaactgtccacctgggcgaccaccgttgttggaatttgcatgaaggggatgccccggtaataaatggaagcgatgaagccggccagatcccctactacgccgccgcccagagcggcgatgcatccggtgcggtcaagcccggcccggaccagttcggaacacagctcctgggcctgaagcatatttttggaagcttccccggcattcactacgtgcaggctgggcatgaatcccgcgctctccagggacttcattacgcgctctgcataaagcggggcgacgcagctgtccgtgataaccgcaatcttgccgtccagaccggcgcggtaggcaaactctccggtacggtccagtgctccgttttccacgtggatgtcgtaggaacgttcaccgagagcaagagaaatggtaggcatgaggccagtatgggatattccggagggaacctcaaacggaaagtgcggatgaggcgaagaagacgcattctccttttaatgcgttcttgtcctgggtgccagcggagaaagagtttccaggataactttcaaatgctccgcgcgtgaggccgtgaacccgccgtcatccttccagatgatattgccgttgccgtccagaaggacaatcgctgtttccaccttcttgtgaagggaaagtctgcggcgtacaaaagactggtcataataggaaatcagggaattggtcttcatgtaaaaatccggaaaatcccccagagcctgtgtaaaggcggggacatcaccttcaattgggggtggctgcagaaccagcaaaatgctatattccaccggggttggcgtatgtttgtactgtttgcggaggtcctcgcagaagggaagccactttttcattccgtacaaagtttccgggtgaaaaacagtcagcatgatatggaaactttttggaacgatgggaggcagggaaatattgtctcccagtaaattcatgccgttgatatccggaaaacggtaacgtccgtttcctcctccataaggatgctcgggattgggcgttggcaagtgtatttcctgattcttcatgccctgttagacaaaattcgaagaaataatgttcatgtcgatggttgccgaacagggtatgttcattggtgcggggaagggccttttttctgttggaaggctctctttctctgaaaattccggacgattagaaaatcggtattcatggaaaagggaatatatagacctgttataagtttttctcgaagaaaggtggggtacaagagtagggaagagagggacgttcaaaaaaagatgcggtggaaagaggctgtatgacaaaagcatatactgttcatgatatgtaggttatgtgagtattggaggggtggtgggaataagcggacgcaaaaaacatctcgaaaaaaattgacaaaaaggtgtggtatggtagatttctcggcacgccaacacggcgacgggatgaaaagcccggcggcggacggactcggaagagtaacggaagcggctggggccggccacccggagagttccctggaagcaggggcgataagaagatttgaagggaatgactaccgaaaaccgccgagggttttccgagggcgtcgagaggcgccggaggagcaaaaagcccgaaggagcgacctagctctgagaggggtggtttggtagaagcaaggggaaagaaaaaaggtcgtgacgcgcgccgtgcgaggcagagcgaagaggtcttcaagagacacaacttgaaggaagagctggctgaagcatggcgcaaatgaaatcgcaagattccatttggtccagcaatttcaaaaattaatttgatggagagtttgattctggctcagaacgaacgctggcggcgtggataagacatgcaagtcgaacgagagaattgctagcttgctaataattctctagtggcgcacgggtgagtaacacgtgagtaacctgcccccgagagcgggatagccctgggaaactgggattaataccgcatagtatcgaaagattaaagcagcaatgcgcttggggatgggctcgcggcctattagttagttggtgaggtaacggctcaccaaggcgatgacgggtagccggtctgagaggatgtccggccacactggaactgagacacggtccagacacctacgggtggcagcagtcgagaatcattcacaatgggggaaaccctgatggtgcgacgccgcgtgggggaatgaaggtcttcggattgtaaacccctgtcatgtgggagcaaattaaaaagatagtaccacaagaggaagagacggctaactctgtgccagcagccgcggtaatacagaggtctcaagcgttgttcggaatcactgggcgtaaagcgtgcgtaggctgtttcgtaagtcgtgtgtgaaaggcgcgggctcaacccgcggacggcacatgatactgcgagactagagtaatggagggggaaccggaattctcggtgtagcagtgaaatgcgtagatatcgagaggaacactcgtggcgaaggcgggttcctggacattaactgacgctgaggcacgaaggccaggggagcgaaagggattagatacccctgtagtcctggcagtaaacggtgcacgcttggtgtgcggggaatcgaccccctgcgtgccggagctaacgcgttaagcgtgccgcctggggagtacggtcgcaagattaaaactcaaagaaattgacggggacccgcacaagcggtggagtatgtggcttaattcgatgcaacgcgaagaaccttacctgggcttgacatgtaatgaacaacatgtgaaagcatgcgactcttcggaggcgttacacaggtgctgcatggccgtcgtcagctcgtgtcgtgagatgtttggttaagtccagcaacgagcgcaacccctgttgccagttaccagcacgtgaaggtggggactctggcgagactgcccagatcaactgggaggaaggtggggacgacgtcaggtcagtatggcccttatgcccagggctgcacacgtactacaatgcccagtacagagggggccgaagccgcgaggcggaggaaatcctgaaaactgggcccagttcggactgtaggctgcaacccgcctacacgaagccggaatcgctagtaatggcgcatcagctacggcgccgtgaatacgttcccgggtcttgtacacaccgcccgtcacatcatggaagccggtcgcacccgaagtatctgaagccaaccgcaaggaggcagggtcctaaggtgagactggtaactgggatgaagtcgtaacaaggtagccgtaggggaacctgcggctggatcacctcctttctatggagcaagtgcacggaagtgcacaggtcggatctcttcccgaggggagagaaagcggaacccgcgagggcccgcaacgaaccaaagatgtgtaaacagccagacgcctggagcgcaacctggcacgacgtgcgtgacgaccttttttcaccgagaaccgcaactgggggtatagctcagttggtagagcgccagctttgcaagctggatgtccggggttcgagtccccgtgcctccaccagtttcgggaaagagacccaaagccgggcctgtagctcagttggttagagcacgcgcttgataagcgcggggtcacaggttcaagtcctgtcaggcccaccagcaaaatcgattattgagggaaagcgaaaattgacatctgcgtggcaaagaaaacgattgctgagaagcaatcgctttccaacaaagtgggtagttgaacaacaactacaaaacacaagataaacatgcataccaagcaatgagacaatacagtaagtcacgaaagggctttgtggtattgtggaagtggtaacagcttttgcaatatgatgaagtaagtaagggcgtacggtgaatgccttggtgccaacaggcgaagaaggacgcggcaagctgcgaaaagcctcgggaagctgcaagcaagcgatgatccggggatatccgaatggggtaacctgatcgaggcaatactcgatcgttcatacctgaatacatagggtatgaaacgcgaaacccgctgaagtgaaacatctcagtaagcggaggaaaagaaagagaaatcgattccgtaagtagtggcgagcgaaagcggatggagcccaaaccgaaggtattccttcggggttgtaggaccacgtcatattcgaccatactggatagtagaacagcctggaaaggctggccggagaaggtgaaagccctgtagacgaaatccagagtgggaattagtggtatcctgagtaatacatcacacgtggaacgatgtatgaacccgcgcggaccaccgcgcaaggctaaatactagttggcgaccgatagtgaacaagtaccgcgagggaaaggtgaaaagaaccgctgtgagcggagtgaaatagaacctgaaaccgtatgtctacaaagtgtcagagcagagcaatctgcgatggcgtgccttttgtttaatgagtctgcgagtcagtgtttgtggcaagactaagggcttccggcccggagtcgcagcgaaagcaagtccgaacagggcgcaataagtcgcaggtactggacccgaagcggaggtgacctacccttggccaggttgaagcatgggtaaaaccatgtggaggaccgaacaggtgaacgttgaaaagttctctgatgagctgagggtaggagtgaaaggctaatcaaaccccgtgatagctggttctcttcgaaatgcatttaggtgcagcgtcacgtgctgatgcgcgggggtagagcactgacaaggctagggggcacacccgcttaccaaaccttatcaaactccgaataccgtgcaatggaacgtggcagtgagacagtgggggataagcttcattgtcgagagggaaacaacccagaccagcagctaaggtgcctaaataacgctcagtggaaaggatgtgggattacacagacagtgaggatgttggcttagaagcagccaccatttaaaaaatgcgtaatagcttactcatcgagtgatcctgcgccgaaaatgattggcgatcaagcgttataccgaagctctggactttgccgcaaggcagagtggtagaagagcgttgcatgcgcgtcgaagggcgatggcgactgaccctggagcacatgcaagtgagtatgcagacatgagtaacgttaagccgggtgaaatccccggccgccgtaaacccgaggtttccagggcaacgtgtttcgtccctgggttagccgggacctaagccgaggccgagaggcgtaggcgatggacatcaggttaataatcctgagctcgcaacccttaaactggggggacgcatgagaaaagatgactaggttattgaattccgagttgagtccacggactcagcgcatcattggatcgagtgccaagaaaagccccagcgtatgctaagcgacccgtaccgcaaaccgacacaggtgggtgggtagaatataccaaggcgtaagagtgaaacctggttaaggaactcggcaaattagccccgtaacttcggaagaaggggtgcctgcagcgatgcaggccgcagagaaatggcccaaccgactgtttatcaaaaacacagcactctgcaaagacgcaagtcgaagtatagggtgtgacacgtgaccaatgccgaaagattaaggcaaggggttagccgcaaggcgaagctctaaacccaagtcccggtgaatgtcggccgtaactataacggtcctaaggtagcgaaattccttgtcgggtaagttccgacctgcacgaatcgtgaaacgagttgggcactgtctcaaccaggcgctcagtgaaattgtagtggcggtgaagatgccgcctacccgcagaaggacggaaagaccctatagaccttaactgtaagctgtcattgtttcttcggttttaatgctcagagtaagtgggagacgctgaagacgccctttagggggcgtccgagtcatcaatgagacaccaccctttgaaactggaggatctaaccctgagccgtgaatccggccagaggaccgtgtcagccggtcagttttactggggcggtatcctcccaaagagtaacggaggagcgcgaaggtgggctcagcccggttggcaaccgggtgtcgagtgcatgggcataagcccgcctaactgtgagaccaacaagtcgagcagatgcgaaagcaggcccaagtgatccggcggtagaaagtggaattgccgtcgctcaacggataaaaggtaccttagggataacaggctgatcacgcccaagagttcatatcgacggcgtggtttggcacctcgatgtcggctcgtcgcatcctggggctggagaaggtcccaagggtccggctgttcgccggttaaagcggcacgcgagctgggttcagaacgtcgcgagacagttcggtcctctatcctctgtgggcgttggaaaattgaggggttcagaccttagtacgagaggaccgggtctgacgcaccactggtgcatcggttgtactgtcaagtgcatggccgagtagctaagtgcggacgggataagcgctgaaagcatctaagcgccaagcccttcccaagatgagttttccctacaggttcgtggaagaccaccacgttgataggtcgcaggtgtaagtgcagcaatgtattgagccgagcgatactaattaccaattgacttcatcatattacatcactccccgtcgtgaatgacaacttgctcttgtctcgttcacctgtgcatgttcatcaaccaccagccacgcagatgtcagtttacgctgaatccctccccacacaaaggacggaaatcttcttagccgccacacacataccctgaaaaaaatccctcactcagaagcccccaaaaaagcagggctcccgggcaggcaggatgaagaaaaaatcacctcttccccctgaagcccggtggccagagcgcagtggtcccacccggtcccgttccgaacccggaagtgaaacgctgccgcgccaatggtagtcggacgacaggtcccgcaagagtaggtcgccgccgggatttttttccatcaggccccgccagtcacttgactcgcggggcctgttcttttcttgctcggtcccgttcttctccccctacattctcttagttagtttccttcttgtaagatgtcgtatttcttgtacgtattagtgttactatgttttctcatgcttttgccgccggggcgcttcttggaactgccatgtctccgcttgtttgcgtatctgccgcagaaagatcgcctgtggcggcggctgaagatgtagtggcgcgtgtaactccctcggcaaagggggctgtcttgttccacttaaatccggatcagggcaacaagatcactatttccggtattgccggaggtatccgggtggaggcgtcagatgtgcgccgcttggtggcgggttatggatggtatttaaagaatatagccaaggtccatttttcgtggaacggaaatcggataacgcttccttcccctttgccggttcccgccagtccggttacggtagaaagcccgtggaatatcgtttttgcctataattactgcaccctttcttatacggcggctttttgggattggaacagatggcagcgggagattgattttctggcgttgaatgggtttacgcatgcgctggtaacggcgggtttggaaaagacatgggaagattttttgacaggcttggggtatcctcgggaaaaagctcttcgttttatccctaatccggcatttgccgcctggtggaatatgggaaacctggaaggccacggtggtccgctgagccagcaacagataaataaaatggcccagatgggaaggcgcattgtctcccgtatggaacagttggggatgacacctgtacttcaggggtatgtgggatttgttccttctgactttcaggaaaatgtccggatagacggattgaagcttattcctcagggggaatgggttaatttcaggaggccgtgggtggtggatcccacttgcgaggcttttcccaaactggccgcggactggtacaaggctctccgcaaggtatacggcattcctggaaagatgtttggcggggatttgtttcatgagggggggcggaagggggatattgacgtaacgcatgcggcgcgggcggtgcaggaggccatgcaaaaggcttctccgggatcttcttgggtgattcaggcctggggagggaatcctgcccgagagttgctggccgggttggagccgaagcgcgcgcttgtattgcagcttaccaaggatatggctaacggaggaaagaatttaaggacttttaatggtgttccgtgggtctggtgcgaactggcgaactttggaggcaatacgggcctgtacggcgggattccccttctttcccggctcggaagtgatttggccggttatagggacaaggggctggtgggcatgggaactttgtccgaaggacttgagacgaaccctcttcattatgccctgttcagcgaccgtttgtggaccggagaggatatttccgtccgggaatggcttggaaagtacgcgcgccagcgttacggttccgcgccaaaggctgtcgtgaaggcgttggaagtcttgtcttcctccatttacagtcccgttcgtattcaggaaggatgtacggagtctattatttgcgctcgcccgtcctggaatgcccggaaggcttccacatggtccagcggggagcggtattatcacctgggagacattgtaaaagcggcgcgcggttatctgaaggccgcgaatgatcagccagatctggtgaaaaaggagacgttccgttatgatttggtggatgttgtgcgtcaggttcttgcggacgctgctttttaccagcttcaacaggtcaggagcgcttttgattccggagatttggctgcgtacaggaagcaggtaaagcgtttcctgtctctgatttcagatatggatgcccttttggcgacggatagccagttcctattaggaacttggcagaaaagagctttggattggggtgattcccgccaggaaaaagccttgatggacaagtctgcgaagatgcttatcactacgtggattgatcaggtcccccggccactgaatgattattccaatcgtcagtgggccgggcttgtttccgatttttatttgcctcgatggagaaatttttttgaatctcagatggacgtgctgaccggaaggaagacgcgcgaagccgcccatgccgcatttatgaataagacggttcgggaggaactggcttttgccgggaatgggaaaatatattctgccaaaccggcgggggatactttggccgttgctaatcgtgtgatgaatacccaccgggaaatgttggacgccctgagtgcggaagaaaagtattcctcgggcagtccatgggaacttcagcaaggttccccattgcagtttgatgtaacagatcaggtgacagaaccgggtacatataccgcaactttccagtggaagaatggtcccagcgccttgaaaatccattccgtcaaattatatgagggaaacaaggaggtggctgccgatgttcatgagggcacgactggcgtggaaaataaggataatgtttacaaattggaattgaagaagtacagaaccaaccttgattcctatactctgaaggcagaagtaagcggtgtttctcagggcgcttccagaggagaaatgatgctgaaaaggctgactaattgagaagcgggcaaaaagttgctgcggaggaggggagacaaggtggttatgcgtgcggattctgccgttttgccgtcttccgattttttttcggaatcagtttgttttcttcgccgaaaaaagggagaagaggaattccctcttctcccttgaaaaataaaatgatggtgaaatttatcggcgacggcggaacaataaagcgcccagaccaagcagccccaaggtagcggttgccggttccggaaccacttcattgctggtggaaaagtttactgccggcaaatatttgccttcccaggagtccagggtattgtttttataagtgccggttccgctgggcaggttgacggtattattggacatggagagggaggcggagacggcgtgatttctgtaagctgccatattttccgtgccggccgtcagattcaggtcttcccaagaggtattttcactgacgaaaagatattgataagtagcagaggaagtcaattccacatcgttaaaattgaaagtcagcgtggctccgtctgcccaagcgttggcgttggaggaaaggccgaccagatcccctaccgtgccgtcaacagtaaaagtgtaaacggccactttaaaagtggtgccggttccactgccgctgcgcatgtccagggaaagactgtttaaataaacggtttcgggaagagtcgcttcctccccacccatagtggtggacataacaggagaaaccaattgggtcgcaaaaccgaagtagttattacctgcgctgctggcagcgttaatattggtggtggagaatatggtggctgcttgggcggcccccaacgatagaagaatggagatgacagaaataatgggtttcattgctgtaatgagaatacatttaatgcattgatatgcatctgagaagaggctgtcggattgcgaatccgaggtcaatctttaattttaaaggagaagaacttgtatagcctgatcattccgattttggaatccgaggaaggttggggatagagtttttttactgtgttccagagttaggcaaaactagaaccgatgattaccgtcgggataaggaatttatttcataaagcactgatgatgaaatcaaaaaatcatgttgttgatcgttcttgtatccggaatctgaaaagattttcagacttttttatggcatcaagacatttcatgtttttcaaggcggattcgcaatccgttatacaataattttattgcactgccgcaatttatgctccggttccaaaaaatgagctgtacagaatcttttgtagagatggattttttttggatatagccttttcgttcagagggctgcctggtaaatgctgaacatcagaatggccattcccgtgagggctgcgcctgcaatgatgccggaggcggtggggactttatattcccgtgatttggccttgaaaagatggtccgcagcccagccgagcacagctcctgtaaagaagagaaaggagtcgttccactggatggcccaggccaggccgaagccgatgggggtggggagccattttcctgtccggggaatatagcggggaataagcaccagaatgagtccgagaataccgcctgcaatgatggaaagcaccttgatgctgtgcaaatggctgaaccccatacccagtgcttccgccgtggccgcccatgttctggctcccggagcattgaaagcctggagagcgttcgcatccggaaccatggagcggaaagccagcacggagacgagggttcccagaaaaattccggaaaactgggcgatgaattgtttgcgggggttagctcccagcaggtagcctactttgaggtctacgagcaggtctgccgaggaactggacgctcctgaagtgatattggccgccatcaggttggctgttacgtgcccgggtgcaatccctccgaagatgagctgtgtaacttttcccatggctccggtgggtgtaatattggcttctccggtgattcggcagacgaccagcgccaggaaaaaggatatgactaccgcgatgcagctcatccagtacggaacgttaaaggatgtatgagccagatagccgagagctcccagagagataagctggcctgtcagaaaccagctcatgggcgtttctattttttccacatctgtcagttttcgttttttactcagggaaaacatggctcccagggaagaaaaggaacgaacaatgcttttccattggaacaggaaagccacaatgctggcgacgaccatgcaggcggttcctccccacagggtccaacttacgctctcccgataacctgctcccgcgggaagcaatttctggctttccagccacggaacgtaaagagcccagcaaacggttcctccgatgaagagactgagggatgttttcatgcctaccagagctcccgcacccacgaacatgagatcccatttgaagaagatagtacgctggtaccagttgccgaggatatgttgctggaccgttccaagccatcgttctcctcctgcagccatggcgatggcattagaggcggcgaaaagggcagaataaagaagggctttggcctgtcccgccgcctttttgccttcagaatagagaactttgagggtttccgccgtagcaatactgtctgggaaccttatttgttcaatgttgatcatctggcgtttcatcggaatggccatggtgacacccagtacggcaatgaaaaatatccaggcgaaggtagtgccaagaggcatgtgctgtcctgtcagcaggagcagggcggctacggcggaggtgagggttccccctgtagaatagcctgcagaactggcagcggactgcatgcatgtattttccagaatagtcatgggggatttggaaatgcccaggcgcacaaaggcgttccagagggcaaaagagataattcctgccgtcagagccaccccaaaggaccatcccattttgaggttggcgtacagattagtgagggaaaggatggagcctagaagcatgcctacgatgacggctctccaggtaagctgcttcattctgtctccggaacccagataaacttgatcgtaccattgctgttctacttcatccggagtgccttggaatccatccagaggcagcggtttttccaagcaggaggggagagggctggaagattggggggacgtagatgccatacagttcataatatagcatttgcgggagtggtggaaaagtcgcatctgtttttctctgctttcggcgttccttctgcttgagacttgcgtgcttgtgacggccgtggtttaatgggcggcatgagccaatcttttacggataaacttgccgcccgcattaaagagaccggttccgccttgtgtgtcgggttggatccgcgccccggcatggatgatttggaggcgattcctgcgctgttgcggaaggttgtggaggaaaccgctccatatgcggcagcgtttaagccgaatattgcctattttgaagccatggggttgcgcggtctggaaatacttgaggatttgcttccggatatgcctaaggatgttccggtggtgctggatgctaagcgtggagatattggagagactcagaagtattacgctcatgcttactttgaacgcctgggtgtggacgctgtgacgttgagtccttttatgggatatgatacgctggagccttttctgaattatgaaggtaaaggtgtttatctgctggcagttacttccaatcccggttctgcggatgtggaacggcaggaactggcagggggccgcagggtttttgaactggtgggagacatggtgctccgttctgtccgggaaggctgtaaaacttccgtaggcatggtggttggtttgaccaatgcagattccagtattctggagcgtattccggatgctcctttgctcattcccggcctgggtgctcaaggcggtgatctttcctgcctgagtggttccggtcatgtggcgcctcccctgattaatgtctctcgaggaatcatgtaccagaatccggaattgggttttgctgagaaggccgccggatttgctcagcgcattcgagaggcattgaattattgatgttcatgtatttttttgcaaataacaaaatgataacggcctgcttatggctgtgcatgagcttgtcaaagggagggggctgatatattgaacaggtgcatccccattccctgcccgttttttatggatgaaaagcccggaattgtaaaattcactccccattccacttccagatccgcaatgttgattgcggtggcagtgacagtgggtgttcaggtggctttgtgtgctgtgcttgtagccatacatttgcaggatatgtggtttccctccgtccagggtggggaagtggaaatgacgtttgtgtccccgtccgaagaagtttctcaggagatggaagaagttcagcctacatctgttgttccggttgcagctccttccacagtcagccctgttccggagattgcgtcagatgaagacttattggcgatgaagctgccggaaaatgaagattgttccgaaatgaaggattttcttttggatgaagctccttccgaactcttgccggaggagctcgccgccatgcggatttccatgaatgaagtaaagcgaaggcagcctgtgaagcgcccggcggtatccctgccggggcgtccggaaccggatcagaatatttctcctgataaaaaggtgcgttataaacatgctccgtccttgcccaattccgtcaattcttctaaagtcgggaaggtgaatgccgtggtgaaagtagtggttggagtaaattcccatggggaaccttcatccgtcaatcttcttcagtcaacgggaaatgcggaattggaccgcctttttatgcgttgggtgagagagaattggactttttatccggcggaaaaggacggtgtgcccattgcttccaaggtggtggtgcccgtcaggctgaatatagattaacctgtacaaggaaatataaagatgcttccggagaagacagagaataggcccgtttatgtgatcggccaccagaatccggatacggatgctatttgttcagccatagggaatgcggagtttttaagaactcatggcgaacctggcgcggttgccgccagatgtggggaaatgacgctgagaacatcctgggtattggaaaaggcaggagtgccggagccgatactgattcatgacgtgacgcccaccgccgggacaatctgtcgtcgtgatgtgattagcgtaagtccggacgatacattcctgacggcgtatcgaaggatgacggagaattctctgcaaaccataccggtaattgacgctgattacaaccttcatggcctattgcgttattttgatttgttgagcctgctcatgcctctgaatatgacggagatgaatgtgcgctccgtcttttccagcctgagcaatatcgccaccaccattgacggaaaatgtctgaccggggaatccttaagtgaggaagaaacgcagaatattctgctggtgggtgcttccagtgaacccagcgttcgaacaaggctcgcaaattacaggagaaaagggattatccgggatctgattgttatttgtggggaccgtccgaatgtgcagctatatgcagtggaacatggcgtacgcgctttggtgaccacgtccggtgctttcccttccttggacattattgagacggcccagacgacgggaacatgtattttgagtactccctgggatacggccagtgttggccagttgatccgttgttcccggaaggtgagggagcaggttcagaaggattacaccgtttttccggagaatatgccactgcccgagttgaggcaggctgccgtaaagcgcaagcaggcattgttccctgtgatgagtatcaagacgaacaaaataattggtgtactgagtaagacggatttggtggatccgccccgtacacgtgtggctttagtggatcacaatgaattttctcaggccgtcaagggggtggaggaggcggagattgtggaggtgatggatcaccaccgtttgggtacccagctttctacacgggatccaatccgttttctgaatgaacccgtaggatccacatccaccttggtggcacgcagattttaccatcgtaatgtggaaccctcccaggctgtagcggtctgcttgtgcgcggggattctttcagataccctgaatttgacatctcctacggcggctcgggcagatagggaaatgttggaatggctgacagggattgccaaaatagatgccaagaagtttacagaggagttttttgccaccggttctctgttgcgttccaaaactgaaccttccgttattattcaggcggacaggaagacttttactgagtacggatacaagattagtatttcccagattgaggaaattggtatgtttggcttggaagatgtccaggaaggtttagtgagggaacttcggaagctggtggagaaagaggggctgaagcttgcttgccttttggttacggatatcgttactcacgattccatgttgctggccgtcggggatgaagaagctctggaaaatatcgagtacgagcggcttggccctaatttgttttccgctactgatgtggtaagccgaaagaaacagctttttcctgctatttcccgtgcattaaagacgttgtagatgccggaaatctttgctttttacaggcaagatttttcctgaggaggaacggcgttgccgtgctgtaaggggtatagatcagggaattgcaatgtctgctacgatagaacggcggatagtatccggtatcagcacagtactggctctttcaggtttgagcggcggcgtgcaaaaaactcggtctaggcgtaatagagggaaattgacaggttgcgtagctccgtaaccggcacctttcagtttgaagcaatcctgaaagtcggaactgagtttggagaaaattggggattgaggggcaacgctgaagttcccggccatgataatgggaagttctccatgctgggttcctacttccctcagggtatcaaacaggtattgaagttgtttacggtggatgaagcggagtgtatggaaatatttccagcaggcgggggagtacaggtcgaagcgatgttcaaaaggttccagactgatgttgatgagccgaatcgccaaggaggaattttccggtatccagtctacaatcaaaccggctgtgtccgtgatgctctgggctggaccaatctgaccgtgccttacaatgatcgcgcaacttcctatttgcttgatataagaggttctaccgaaaatactgtaggcaaatttaagtgttcggttatagttgctgcagccttggacgaaaatgacatctgcacggagtttggatatttgttcaatgggaggaggttcctcgcagccctcgtacaaggtaagaacccttatttgcctggcatccggagatggcggcattttgtagtattccattccagttctggcaatgggcgggagaaagtctgtaatgacgatgccgtacgcaacccagacgataatgccaagcagaccgatccgggaaccgaagaccagccatgcaatgagcgccggaaaggagaaaatgagacagcaagcccatatgggcagtgacgttgcaaaagccatcgtgtctgaaccggtccagaaaatagtgacgacgatgacccacaggcacagagagacgccacccagcgctattcccaagtagttgactccggatagcgttggcagaggttctgccagatgtttgcgtcttctgagccgatgcactgtggtgacagattagaagcccatgccgggagggagacccaagcctcctgtcagctttttcatttccgccgcggctgtttccttacccttggcaatagctgcattgatggtttgaaggagaagctcctggagaaattctgaatcagacgggtcaatgatggaaggatcaatgaccagttccgtgaggttgccgtcacaggtggcggtaactttcaattttcctccagctccttccgttgtaacggtttgggaggcgagtttttcttggacggccgcaagccctgtctgcatctgctggacctgcttcatcattttcattatgttcatggtcgttgtgtctggatggatgagttgactattgggaaatgatacgagcccggaaaatctccatagcggcatcaatcagcggatccgtgtagtaagagttatcttcattttcctctttggaagcttcctggacaggctctgcggtttttttctgcggggtatgaggtttaggtgcaggaatggtggatgcggaaggaggtggtgcaggcagaggagccagttcttcctgcacgggttcgggaatggagaaatcctgacggatagaaatagtaacagaggttccaatatattgggaaagagcggcttccaaagctgttcgcagagggccgactccaagactgtccatcccctgacggtcagaaggatgaaaagaaatggcgactgctacgccatcataaccggaaaaaacgctgttggctagaaagtccgcttgaagagggaatttggcggacatttgttccaacaccgttttccagtcttcttccgtgatagttcttcctgattgttgggacagaactgccggttcctctttttctacgggtgcctgggttcgggatgatgagcttggagtatcgaatagattgtcaaagaaactgttagttcgtctttccagaggaagattttcctctggatccataaaagtaggctctggagaatccgtaggaaatttcgacacatcggaggcatcggagtctggatgccgggtgatttcttcggaggcaggtacggtttttgtccgcaatttagtggcggagtagggaaattcttcctctgcaatggcaagagaggggggggctgcagcgggtgtaagagtttcctgttgtggttcggcttcctgcgtaggatggggagaagcttgagcgtcagtgctctgaattttctgtactgcgggagatgaggcaggggaggacacagaaaaatctggaatcggatccatcaaatgttgttctgtagctggggttggttttgttgcagcaacaggagactggatgtttggccggggggccggagtgggagccgtggcggaggaaataaatgtacttggttcctgctgtgaagcaggatctgaagaagaggccggtgccgcagtggctagcggagcaccttccaacgccatgataatatcgctgatgctggcctcagccagagtatgaacggctttaatcaggcccatttccagatgaagccttttattggaggaccagcgcattttatcttccgtttccgccagaacttccaccaaacgcaggattttgtccgtatgggtgcgtttgaccaattcggcgagttcctccttggaggattccgggagagaatcaaagctggcttctggatctactttagagaccagaatttcacgcacggcggagataatttcggaaagaaactggctcatgtctcttcctgcttccgcctgttcatgcagaagatgcaggagagagggaagttccttgttcaaaataagcgccagagcatgggccacggtctcccgggaagtaatgccgaaaatgtggagtacctgctgttcttcaatatgatctccacagaaggaaacaagctggtccagcatggattgtgcatccctcatacctccatccgccactttggcgacagcaaaggctgcttccctgctcagacttactccctctgcagaagcaatatggagcaggtgttctgcaatgatttcagaagggatggggcgcaggtcgaagcgctggcatcgcgatagaatggttggcagtattttgtggggttccgtggttgcgaaaataaatttgacatgaggtggcggttcttccagcgttttgagcagggcgttgaaggattccttagtgagcatgtgcacttcatctatatagacgatacggaaatttcctctgctcggagcgaaccgtacgttgtccctgagatcccggatgtgatcaatgccgcggttggatgctccgtctatttcaagaacatccaggctccggccttccgcaatttcttcacatatatcttcatgcgggtcaaaatccactttggggccaccgctgcagtttagagctttcgcaaatattcttgcggttgatgtctttcccgttccacggggacctacaaagagataggcatgggcgagacggttgtgctcaatggcgtttttcaacgtccggacaacatgatcctgtccaaggacgtcatcgaatgtcagaggacggtattttctggcaaagacctggtaactcacggttcagaaagactagaagatgagttcccgtttgaaaagaaaatagagagtaattgttttaaaatgttgataaaacggttcttgcacactcccgctacggagcttgcctgaaaaaaatatcaagaaaacaatgaggatgtcattttgatattgaaatctgaaaatgttcatgccaatctcacaaaagtaacaggaaccttctcatctctataatttcctatgtgggtcaaagtatcaatagcagccttggtcattgctcttctcggaggagccatgtattatcttgataacgaggaagctctaaccaaggagcgtagggaatgtgcttcccgctacaagaacctgaacggccttcgtggcgaatttacggaagaaaagacgaaatatgtcgatttcctggtgaagaatgaggctctgacgaatgacatcaatgctttaaccaaggaaaaggatgaactggaagtaaagaatcaggaattggcctcagccaatgaggccaagaaatctgaccttcaaacgcagcaaaccgctttggcggaattgcaatccaagagcaaggatatggaaagtatccaagccattgctgacagaatcaaggggctggaagaagagtccaagcagttggaagtggttaagcaggcggaacagggaaaacatgatgccatcgttgctgaaaccgaacagcttgttgtgaataatgccgctcttcgtcagctcaaggccgaccaggatgcccgcctttctccgcccaacctgaaaacgagggtttcccaggtgattcatgattttaatgtagttgtgattgacggaggagccgccgatctgggcgtggtgcccggttccaagttggccgtcatgagggacggcaacaaaattgccgagcttgacgtaaacgctgttgaatcccgtgtttccacggccactattctaccaagtacggtaaccgccggcgaacgtgttgaagccggagacgtcgttgtatctgttcgtccctagcatttttccggttcaatacactccatacactctcacatacatacacaatgaaaactgtcttagtagttttattgattcttgcagcaggggcgggcgcctggttctccggtcttagcggccttttcggtattaatggccagtaccaggattttaaagaaatgatttcgtatcgtaagaccttggacaaggaaatacgtacttggacaagcttgcgcaacgacatgattaagaatcgtggcttggcagcggaagaaaatcttagtctgatttccaacaaggcttccgtgacgcagcagcgtgatgaacagctttccaaggaagcggagttgaaggaagaagaagtgcagttgaatgcggacttgtccaaaatcaataaacagattgaggaattaaagagcaagttgcaagatttcggtgtttccagcgtacaggaaatccaggagaagatggaatctttggaagcttccaataagaagctccaggaagatattgaccagattaaaagtgctacggaagtggcttccaagagacgggcagaacaagcttctgagctggctagccgccagaaggagcaagctgaataccgagctgctcttgccaaaaatggggaagagtatcccgttctatccgtggatccgcagtggggttttgttgtgattggggccggacagggcagtagtattgatccaaatacggttcttcttgttacccgtgaaggtcgcagcattggtaaattaaaggtaacttccctggagaaaaatcagacggtagctgacattattaaagacagcgtaccgtctggtatgagtattcaacccggcgatagagtacaactcctgcgtccccgtcagtccgccaaataaaggtttgccacgtattttccttgaaccccgttgtgtcgtccggcataatggggttcaactttttaaaaggaaatgatgaaacgatttgcaatctcctttttgtttgtgtctttttctattcttctggtctcttcctgttcctggttgatggaaccgcaggagagggagcgtgtgccgcagccgcctcccggtccggaaaagagtgcgcttcctcataataagacccaaagatttgaggcggaagcaacgctcggcccgttggcctcgccgagacgttaacggcatccgaatgacgctggacggtgattctgttctttacagtatccgacaaaccggatacaaccgcctccggtttccaagtggagagatggctgagctggtctaaggcactcgactcgaaatcgaacgtgggctttaaaacccaccgtgggttcgaatcccactctctccgccagtttttcagtaagagccccgtcggaagacgaggctcttattttcgataggaaaggaacaggcgggaattcagataggcggctgttcagtgatagagggtgcgttcttgaccggggtctttaaggcggtctccgccaggatggttgtaactataataatttttgttggttgtttcggtcggtttaccaatgattacatgatccagaaaacgaacgcctaataatttggagcattcccgcacgcgttcggtcaggaggtcgtccgtacggctgggggctggatttccactgggatgattgtgggcaaggatgaagccataggcgttatgaatgacagtggggcgtaatatgtcacgtggatgagcaatggattcgttcaaggtcccgctggatatttccacgggtttgatgaggcgacacttggtatccagcagcagaacgagcaccgtctccttttccttccagcgcatggctgtagtcagataatcatagacatcttccggtgtttgaatgggttgacgtgacagagtttcacggagagccctcgctcccagttcaaaggcagcgctcagcgtagcggctttcgccatgcctattcccttgcaaatgttcgctatttcagcagcttccatatgagctagggcatctagagagccagcagactgaatcagatccgaggacatgtccaacacatttttccccttgatccccattcggagaaagatagcaagcagttccgcgttgctgaggctgtgccttccttggcggagcaatttttctctgggcagagactgagagggcagttcctgaagtttgcggtaggtcatttcaataacagaggcgtgcggtagaaagaatggcggaaggcagatgtcgcagcgtatcccctgccgtcaatgtttgctgggtggcttctccggcggagattgccatttcggaagctcggccacacaggtagacgcccagaacggcggaaaccagcagggattccccctggcttataaagcctccgcaaatacctgccagcacgtctccctgaccggcagttgccatgccgggatccccagtgatgttataaaaaagaggttttccccgttgggtgacgatggtgcgtgctcccttgtaaaccagggcggcttcatgttctgccagaaagcagtcggcaatgtctgcccggatggcatagttgtctgcatctggcagaagtctgcgaatttctccatggtggggagtagccagaacgtgttctcccaagttccactgcatggccgcggccagattcagcccgtccgcatccagaacagtgggggtacctgtttccagaatgaggcggatggcttccgcatcttcctccgatacggaaccgatacctgggccaatgaggaaagcactgaatgtgcgaatggagatatctgcgtaactgtccacgggtctgaccatgatttccggaggcatggatggagcgattaagggatagacgtttttgtgaacgtgcagtgtaaccagaccggctcctgcccggagagctgcttcacagcagagccgggccgcacccagcattccttcagagccagctatgacgccaatgtgcccgcgtttgttcttataatccgtatagggtcttgcagagaggaatttggtaagccgtgaggaggtaataagttccgtggcggggagcgcctgtacgtgaagaccgggaaggtcaatgcagactaagcgtccggcaaacagggtggcgtcatcgtccagcaggccctgcttaacggctcctatgcacatggtgaaatctgcttccactgcattttgctgaggcattcccgtatctggatccactccggtggggatatcaatagccacggtacgtacagccccgcaacggtttcttatatagttcatttccgcgcagagagcggagatttccctgcggagcattccctttgcccctattcccagcaggccgtccagcaggatcataggttttcccgtacggggaaggggaggggcctggtattcctgagggggaggagatatttccgccaactgccgcacggaaagttcgctccattcgttgcgcgggtaagcggttcggaagcctatttcccagccatgttgtttcagtatgttaaggacggtgagagcatctcccccgttattccctttgcccacataggctacgcacaatcccgggtcggggaagaactgcatgagagattccgcaataccggaagaggccagtttcatcagggttctggctggtgttccgctaacgatgagctcgcgttccgcgatctgcatattttccgtggagcaaactttcatggcatactgatagaggcagcctttactgtaagctaaaaaaccttctcctgcaagccggagaaggtttttaaaaagaagcggaccagggagcagctaaccgatgcggaacgtgatgcgcgctttggtcatgtcataaggagacatttccatacgcactttgtcccctaccacgattttaataaagcgtttgcgcattttgccggaaatatgggccagcacttcgtgcccgttcggaaggcgcaccttgaacatggttcctgccagtacggcgcagatggtgccttccacttcaatttcactttcggagttttcttccttggactctgatttattgaaattctttctgcccttggtgtggcgtcctccgcctccttgcgggcgttgcctgttggcgttacctccggggcggcttcctccccctgttctggaatttcccggtcctgcagactgtccggccgaccgtgccgctcctgtgccattgccggaaggtctggattgtccgggacggttactggtgccggtcggtctggaaccggggcgggaattttgtccgccgctggggcggctgctggatcttggattcgggctgataggactctccttgtaaagttaaaagaacgcgtgtgtacaaatcccgcgcagacgaatgatagaccatatttttgcaagggcaagtcctgaatgcggaagttgtgcaaataaaacacaattctatggagaaggacgggaaaaaggctgtaaaagagaaaaagtatttgacatttacgtgaataatcattaggaatgcgcccccgaattggaagataacggcaggatgccgaaaaacgagaacgaagaattgaaccatgaagaccttctcagccaaaccgcaagaagtagagcgcaaatggtatgttatagacgctgccgacaaggtgctcggccgtgttgccgttgaagcggctaacattttgcgtggcaagaacaagacaattttcaccccccacgttgattgtggcgattttgtcattatcgtaaacgcggacaaggtggtgttgaccggtaacaaggaaaatgccaaaatttatacccgtttctccggttacgttggcggtaagcaggtggacaccccccgtaagattcgtgctcgccgccctgaacttcttctggaactggctgttaaaggcatggttcctcacacccgtctgggccgtcagcaaatgaccaagctgaaggtttatgccggcgccagccatccgcatgaagcccagcagcccactgccattactctctaattgatttttcagacatgagtcagacaaccccatacaacgccaccggccgtcgtaagaccgctattgcacacgcttggcttactgaaggttccggccgcatcacgatcaaccgccgcggttttgaggaatatcttcctaccgttcagttgcagaatgctgttcttcagccctttcaggttaccaataccatgaacaagtttgatgtgaacgtcgttaccaagggcggcggtattcacggacaggtgggagccattcgcatggcgatcgcccgtgctctcgttcaggttgatgaagcttcccgttcccagcttcgtgaattcggtcttctgacccgtgattcccgtatgaaggaacgtaaaaagcccggccgtcctggagcccgcaagcgttatcagttctccaagcgttaagcttggctggttgcgaaggaactggctttaccatttctttctcggaaaaggagtactccctgtggagtgctccttttttgttgcaggaagaactttgctttttactgcttcacgcgtttttaaaaagctttttctggttgggttgcttacggcagctttcaatgattttcctgcatttgctgtgaaggggggaggtttcccagtgcaggaatggtttgttgacgagggttaccgatggtatggtgttcctgccagaatagtgtgacagcggtaaagctgttccagcaggacaacaagcgccagttcatgttgaagggtgaatttgctcaaggacaggatatgattgcaccgggaccgcaattcttccgtatgaccgtctgaggctccgatgagaaacgcgatgcggcgtacggaatgcatttgccagtcctttgccaggtcgactagctttcttgtggtccaaagttctccgcgttcgtccatggcgatgcgcaggcaaccctcgctggcggccagcagacgtttagaaacgtcttgggagcttccgtccctgacaagcttgagttccgttttgccgaagggcctgaggcggttgagatagagttccacgccttccttggcgtagcctagagaaggctttccggcggccagaatcaggaattgcatgagaagtcaggagttggaagatgagttaaggtagttcagcagggtgcgggcccaagtttccgaaatgccgcggatggcggcgatagaagccgggtccgcctttttaatggcagttacggatttgaattttttccagcaacagtcttttttttgaggcgctcatgcctggggcgtcgtccaaggcgctttcccgcatgcgtttgcggtagagcagttcattatagccgttggcgaagcggtgggcttcgtcgcggatgcgctgcatgagtttgagggctcccgtgctgtgaggcaggcaaaggggctgggactggtggggaaaaaatatttcttccctctgcttggccaggcctacgatgggcatgtctcccaggccgatggcttccaaatcggccagagcggaggaaagctgtcctttacctccgtccacgactaccagatctggaactttgatgggggcttttccttccgcgctgagtttcttaagccactggtacagggtcatgtccgcctgccgtgaggctacggcgtcgctctccgccagaatgcgggagtaacgcctccagatgacttccgacatggaggcgaagtcattttgtccgtccacagtacgtatacggtaccgacggtaggctttgttatccggcctgccgttggtaaagcgcaccatggaggctacgatatggttggaagagacattggaaatgtcaaagcattccatgatggttgggggagattctaatcccagggccacccccagttccttcatgtcttcttccggatgaacggtgccgggaagatcgggagttccttttcggaaccgccgggcgggttccagtaccttgaccagattgtcccggatgtcccgcaggtatgccgcacgttcaaagtccagttcatcggcggcttccatcatttccccggtaagttcgtccagagtgctttttctgcccgttccttccagcagacgcaccgcctggtcaaagttccggttgtaatcattgatggaaatgcggccaatacacggagcggagcagttgcgaatcacatccgcatggcagtgcctgaagtcatggattcccggattttttgtcttgcaggttcgcagccggaaatgccggttgagccattcctgcgtggcgtaaagagcctgggagtggacaaaggggccgaagtagcgcgctccgtcatctttgcgcacccgcgccagctggaaacgaggcagtttttcccccttcggaattttcagcagggggtagcgcttgtcgtccttcatctggatattgtaatgcgggcgatattgtttaatcagtttgctttccagcagaaaagcctcctggtcatttctggtttcaaaataatcaaatgacgcaatagcattaatgagcgctcttgtcttatggttggagagtgtggctcccgtaggagaaaaataattgcccaggcggcggtgaaggtccttggctttgcccacgtagatggtatttccccgggcgtctttcatgatataaacgcctggtttgtgcggagtttccctccagagttctttcagggttggttgctcgcggtctgccacgcaggcattatgccatatgaggcaagaaatggaactgcggaaacgtactgtattacggctacttggcttgcctaggaaaacttcttctgtataatcccctatgtcttttgtatgaaccctgtaccgtttaccacgttggccgccgccatggattttgtggtgggagatagaaattatcccctttctgagctgttcatgaaaggcggtttcatcatgtggccgctgcttctgttatccatcgccggagtagtggtgctggtcatgtgctgcttttctacccgtgctgccgccgttttgcctaccaaactggtggaacaggcggaatctttcatccgcaagcgggattacacggggctttccatcctctgcaagaatggagattcctgctacgctcgcgtgatgttgactgtagccaacttcatgttgcgcaacccctccgcccagtttgaggaggtgagggagatagcctctgcggaaggaggacggcaggcggggttcctaagccgccagatttcctggctgtcggatattggcgccgtagcccccatgctggggctgttggggaccgtggtcgggatgatgaaaaccttttttgagattgccaacggtgatttttccgggggcaagcaacgtattgacatggcgggcggcgtggcggaagccttgattacgacggcgggcggcctgatgcttgggattcccgccatcctggcttatgtatatttccgcagccgtgtacacaaacgggtaggagacctggaggcagccgtcacgcacagtgtttccgtagttgccacccagcttcagaagccacgagccggtgcagctggggcttttcatgaagaggaacttcccagagtccccgtagatcccacttccctgcgcgatgtgcgtgggctctagccggaacgcatccacttctccacctcaccggaagattgtatgaaatttcattataaaatgcccagtcctatcgggttccaattagcccccatgctggacatcgtatttctgctgctggtgtttttcatcgtaacccagacatttgaggatgatgaaccggatctttccatcaatcttccttcagcagagactcccaagcccggtgaaaatgtgtccaatgaaattatcgtgaatatccgtaaagatggtaccgtggtaatcaaccgccagcagtacacaatgccgcagctggaagacaagcttttttccgtcgcccggttggacaaaaccatgctcgtccgtatccgcgtggatgagaaggcggaatccggcgtggtggtgcatgtgatggacgcatgtctgaaggccgggctgaataacgtttctttttccacgcgtcctccggttccatcttcaatcaatgtttccaattcccaggcttcatgaaagcgtttttttccattaatgcaggtttaataactttggcgatgttttccgccgcccaggaaaatattccggatgccgctcccatcgcggatggtccgctggtcgctaatccggagcaggatacgctggatatggcggacatgctgtacaagcaggcccaggctccggctacgaaggagaaccggcaggaatatggacgccttcttgatttaagcttgcgtaaatatctggaatttacccaacgttttccccagtccgcccaggctcctctggcggagtatcgtgctgccatgtgtttggaggagctgggcaggaaagatgaggcacatggcctgttcctcagattgattcagacgggcagccccgccctggttgccgcctccgcctaccgtctggcgacggatgcttcttctgccggggagatagataaggccattcagtattaccagctcgtgattcgcaatgcggaacagaatgatttgaaggtggacgcccagtaccgtctgggacgcctgtttctttccagcggtaatccggaggcagccgccaccatgttttgtgcggtgatgggcaatccggaagcggatgtcaagtttgttctggtgtcccggatgggatatgccgccctgtgtgcggatacgggacgcttgggagaagcttattccgaatatcgcaaggtgctggaaacgcccggtgtggataacaggaacaggggaatcgccactcttcaggccgccatgctggccaccaaactgaaaaagactgcggaagcccagggcctttatgaacggcttttgaaggacgagtccctgaaggagatggcgccggaggcccgaatggggcttcttctggggctgtacaatatgggcaagtacagggagatactttcccagtatgagcagcagaagggaataaagatgccgacaaaggacggccaggtgcgtctgctgatgctgctggggcagtccgcctataaattgaaggagtatcggaaagcggcggatttctttctggaagcggaaaagtccgtcccttatacgcaggaggccatgcaagcctccttttaccggttgttgtgttataatgaactcaagcagaaagatcttccccagcgggctcagagcttcctgaaccattatgccaaggcttttcctaccagtgaactgcatgatatggtgcgcctgatggctgcagagaacctgttcagctccaatccggcagatgccgcccggttttatgccagcattgattttgacaaggtgcccccgaagatgcgtgcggatattttatataagagcgcatgggcgattgcccaggccgggaacagaggtgtggccgccaagctgctgactgattttatcaatgattttccgaaagatccccgcatttgcgaggcattgacgttgcgtggggacatgtatgccaagaccaagaaggaagctgaggcgctgatggattttgaccgtgtgattgcccgctggccgaaagctgaatcagctgccgccgcatggcagagagccgctcagatttatgcgggacgccaggatatggcgaacatggcgaagtattatgaaggcctgattcagaattttccgaaggcgtctcctgccgctttggctgaagcccatttcctgctggggcgtgcggcgtttgaccagggagatttcaagtcttctatcagccatatggctgaggccaagactctggatccccagaaatacggagaacaggttaatgtgctttccgttctgtcctatcacaagctccaggacgtgaataaactgaaggaggccctggaaaccctgcaaaaggaaaatccttccgccgtggctcgtgtgccggatgtcatccccgcatggctgggccttcaggcctatgggatgaaggatctggaaacggcggacaagtatatgacctgggctacgcagaacgaccagcttcagaatgtgaagaaggtgatttggcgtaatttggcgaaggtgcgcctggcgctcagaaagtatgaccgcgccttggtggcttccaacaattttctgaaggatgaggaccagccttaccgccgtgcggacggcatgctggacaaggcttccattttgctggggctgggcaagtatgcggatgccaggaagacggcggaagatgcgctggctctgggcgtggaaggtcctctgatggcttccttgaaaattgttctgggggatatttcctatgcggagaaaaagtttgatgaagcggccaagcattacggtgttacggccgagctgtttgtcaatgacgctgaactgaaacccaaggctctgttcaaggcggcagaagctttggacaaggccggccgcaaatcggaggcttcccaatatcggggccgcctgcaaaaggaattcccggattggaaacaggatggagagtctttgcctccggacgcacgataagcgttttaaagattgaaaccggaaatggagaacaggcgtaaaagatggtatgatctgtttggattgctgcctcgcaatctgggccgtctgttgctgtggttcagcctcattcctatcgctttcatcatcgttcttctcgtttatgcatggagggcggaccagtatgagctggacgaggttttggcgccgttggaaaattgtgccgcatatgatcgcaacggccagtggataggcaccttgacagatcatgaccgggtgtatgtagcgcgcaatgaactgcccgataatctggtgaatgctttcattgcgcgggaagatgaagactttttcgaacatggcggcattgtgtactcttccattatccgctccatttgccggaatctgactacgttgtcctatgcccagggtgcttccacgattacgatgcagctggcgcggaattgttatgagctgggggggaagaccctggatcgcaaggttttggaaatggccgtggcccgccgcattgagggcaagtattccaaggatgaaattctgacggcttacctgaaccgcatttattttggccagcaatgctatgggattgcgcaggcggcggatttgtatttcggcaaaaaagtggcggatctgacactggcggagtgcgctaccctggccggtctggtgcgcggaccttccatctacaatcctgtttacagcccggaggctgctgccaaggtccgcaatgcgacgctggaaaggatgtttgagtgtgaattcattacccaggaacaattatggcaggcgctccgcgaaccgatggcggtggccggtaaacgggaagctcggcccggttcttatcccgttctggtcgtttcccgcgagttgggagacctggattgctgcgacgagcaggagggaacctccagcatttttgtaatgaccacgctggatttggaattccagcggatggttgaagatgtaagcgagcctatgctggccgctctggaatcttcttctgtgtgggcagggttgcccaaaagggtggacaaccagttgaatcgttgtgtgcaagcggccatattgtgtgtggattcccgtaaaggggagttgctggccgtaacagggggacgctccgcccaggacggtctggaccgatggcagtccagggtaatgcccggcgatctgttcactcccatcgtcaatttatgcgccgtcgaccagcgtagaaccgttattcgcagcaatccggaagtcactggccgcggggtaggtttcaatacagtaatagaaacggcacaaaaggccggttacaaaggggaacttccccgttcttcggacttgtataccggcaggttttccgtgcctctttcgcatgccgtcaatgccctgtatctcatcggcaatgacgggctcaatgtgagtatttcctccgtcaggcaggtgggcaccaccaaaaagaacctggtgatggtgaatgctccctctccggaagaaagccgccgggaaatcctgcctagggaatccgcccacctggtggcgtcccttcctcccttccgctacgacgaacgaaccaggaaaaccttcgtcaatgtcaaacttccgggaaatacgggacatttttccgccgtcatggggcgttatttcacggtttttgcctgggtgggctttgattctccggaggccgccgtctatgaaaagaaaggggtttccgcggcgttggcaaaaacctgttcctccctggccggggaggtgtatgaccgtgcggaggaaggccgcagaaaagctgtccgggaacgtcgggagcgggaaaatgctgcagagcagggcccccaatgaagttcaattttccattagtagaagcatcatgagacactcacttgaaatgaccacggccatccaggccgccaaatccgccggagcttttctgaagaagcatttttatgagcaaaagaaggtggatgaagccagccagaatgatatcaagctggagttggacaagctttcccagaaactgattacggaggaaattctttccgtgtttcccaaccacgctgttttgggagaagaaggatacaccggggacaggaacagcgagtatgaatggattgtagaccccattgacgggacggtgaattatttttacacgattccctggttctgcgtctccatagctttgcgccgccgcggggaagtggtgttgggcgtgatttacgatcccatgatggatgaatgctggcatgtggaaaagggcgggattccgtacatgaatgatcatcccatgcattgcagccggcgggaacgcatggcggaagccgtggtattcgtggggcacggcaagacggacggttccaaagaaaaggggattgagcgcttcgccaggatcgcttggcaggtacgcaaggtgcgcaataacggttctgcggctctggccctggcttatattgcctgcggcagatttgacgcctatgtggaaagcgtcatttccatctgggatgttgccgctggggttttgctggtggaagcagccggcggcaaggttgttttggaaccgaaggaagataatccggaacagttcgccattgccgcatggaacggccgcatccctatcatggaggcgctgggagaataacccgaacattattgccgcagtaccgtatgaaaaacatgatcgctttgaccgggatcgggtatgatattcaccgttttgcggagattcctcgccccttgatgctgggcggcgtgcatattccttcctcccgcggcctggacggccattccgatgcagatgttttatgccacgccattgcggatgccctgctgggtgctgccgggttgccggacatcggctactggtttccgccgggcgatcctgcctgcaaggacatcccttccctggatattgtggcgaaagccgtttctctgattcgggagcgtggaggtcgcatcgtgaatgtggactcgtcccttattgcagaatctccccgcatttctccttatttggagcagatgaagggagctttgggaaccgctctgggaatctctccggtccgcgtgggtatcaaggccactaccaatgaacagcttggcgcgctgggccgcagggaaggcattgccgcttttgccgtagcggctattctgatgccggaggatttggccatgccgtaaggcgaatgctccggttccgtttctggaagccttttttcaaaaaaggaagccggtacggggctttaaacaaggaatatgtttcagaaataacgggcaggtggaaatggcgcttttttggggagccttttccaagcagttttaatgaaatgacaggaaatttttaactgttccctggcggaaaagccgtttttggctgcataataatattacccatttccctgcacagggaagaggcgttgcctgatatcagctgatgcagcggtaataataatccacgcgggagatgaaccaagaccatttgaagccgggtttgccattgtccagcagaaggtgggggcaacgcttgccggtccagtagtaatggggcacgacattccgcaggggaatatcgtgggcatacatgttgtaggccgccagcttggcggcgcggtcaaaggttttgacgatgctctgtcctcgcttctcacacatttcaatgccgatggagtacatgtctccggggccgccccggtccgcatggcgtcccgtttcattcagggggatatgctgcatggtcacgtacgggtctaccgtataatgccagttgcagcgcaaagctccgttattcagggcgcgcgcatgctgcatagcgtctgcggacgggttttccgtgttgtgcatggtgatgaagcgtggcttcattcgggaagaacggcggcggagcggagaagatttaggcatgaacatcggccggacgttacattccgccagcaattggcgcggagaacgtttcaccacggggaccccggagggcttaaaggagatcatgggagccattcctgcttttccggaaggttccgaacaactggtcagggcaagcagggcggcggtttccagcagaaaagttctgcggtccatgccctggactttctccagcatgggctggagctgaccggaaaagcgggcaagataagtggcgatggtggaaatattgctcatacggaggccgggggatggggaattttcagcacggatgcaggaaaagttaagttcacgctaagattcgctcttcttctttgcaacgaaaaagtgtgaaagcttcagcattgtgccgaattcttcgctctttttgtcatattggtttgcttaaaccgttgttgagagcagaacagtctctgcttctgcggcggtgacggcattcgcgcctgccggggacagaatgaattctcccttccgggccgttttcccgtcccagagcacggaaccgcagaggatcgtgaagacggcaaagcgggaggagtccggctgggtaaaccgttctcccttatccaggcggtattcctttgtggtgaaatgcggcatttccgtcaggtatccggggcgctggcagagttcccggaattccccgattgaatccaatgcctgttccaggtgcagttcccgtcctcgtccggagtcatccgtgcggttccagtcataaaggcggtaggtggtatcgctattctgctggatttccgcaatgaggtgcccggcgccaatggcgtgaaccagccctgccggaatgtaaaggtgttcccccggttccagatgggtggagcgtatcagttgctccatctgtcctgtttccgccgcatgacggatgtccgggagtgtggcgttttccttcattcccccgtaaatcagggcgtctggggatgcatgcagaacataccagatttcattttttacttctccctgccgggctgccgccgtgcgttccgggggatgcacctgaacggaaagattttcgcgggcatccagaattttgcagagcaggggaaagcgggggaaacgctcgtagccgggaccgaaaatttcctgccgatgttcttcccacagccgatgcagggacattccttcccattcgccgtccttgactatactcatggcttcaggacggtcgctgatttcccacgcttctccataagctgtttcccggtcgggcagttcccgtcccagcatggttctcatactttgtccgccccagatgcgcggctggtagatggaatggaatcgaaaaggctgcatggttgtagcggaagcgtaggatatcttttatggacgggcaagcaaaatgcccacagggtttcctgtgggcatggagagaggaagacggagaattgcctgttatttgatggattcccagacaatgccgatttcgtcaaatggcacatgttccttgttcttgtccggtttcggaacgccgtagttggtccggaacaggggcaggatgggagctcccgttttaggatccttgctcatgggggccattccaacttcttcaagcagaagagtcatgccgaattcaccaccaggaccttcactaaccaggatttcaatggggtaaaccttgccctgttccaccgtgaactgcttgccggctgccacaccgcgcatagtgttgttccagtgcccggaagaactgtatttgtagaacgtaacgggggggacattgatgcccacttcccggagttcctttttcaagtcgtcattgccgggtttgccttccatggcatcaagccatttggcattgtttgccgtcatttttcccagagaagcggattcccagccgtagtcgaagacattctgtttattgaaccgtactactaagtagtcgtctcccagtcccacgaatcggaacgtgccggacttgggggcgcgtacttttccccggtaaatggcgagccactggctaggctttactttgtcatcgcaaccgtaggccttgggagcgtctttggcgggagttctgggtatgtagaactgggctgcgtataattgttgcggagccttgtaaaaacggttcagttccgattcgttccagcctttgttcacgaagcgagaaaggaactccctgtactggttcatgttcatgttggtaggacgtccgccaggagtctgcttggtgtcgtaaaaggtacctaccagcgtgcttccggagggtttggacgtaccgaaggcggaggtggagtctcccaggtcggggccgaagccgtcccccatgccgagggcggttccctcctccagcatgacaggttcatcgggcgggtcaatgtcgatcttggggaggctcaccggagcggcggccgctgccaccacgaccttgacgggcgtctccgcatgggaggaagaggaagtttccctctgtacttccggcggcggaggcgtatccgacggcggcgcatcgtccggcgtgatgtagccgacgactttgggttcttccggaggggcgatgatgatggtcagggagtagagaatggctcctgccaaaacgacggagagaatggatgtcgctaatgcggcaatataatttttccgcctttccttgcgcagggattccactgcgtcttccgtgggttctatatgaaggctcatgcatgtatgatagcacaagaatcccatatgttgagtaacatgaagataacagggataacatgtcggtaacaaaaaaggcggccttgccgtcctttctccgtatgggcttttcagcgtttcctccgtctttccgtccctcccggtgccagcgcaatggcaagggtggagcagatgcccagaatcaggggataatacaggtatttcatgatcagcaggggagaaacctgggagattccggcggccatgagcatttgagcgccgtaggggatgactccctgaaccaggcaggaaaaggtgtccagaatgctggcgctgcgtttgggtgggatatggaatttgtcgcttatttccttggcgatggggcctgccgtgatgatggcgatcgtattgttggccgtgcagaggttggccagggaaaccagcccggcaatgctgaattccgcgccgcgcctgctgtggatatgggccgtaatttttccgataatatacgcgatgcctccgttgaaacggatgatggacagcacgccgccggccagcagagtgacgatgatcagttctcccatgccggtcatgccgctgcccatggcttggaaccaggccatgaaggagaaataccccatgccgatgccaatcagtcccgttgcaaggagccccatggtcagaacggccatgacgtggattccggccagggccgtcaccagtacgagcagataggggaataccttcatccattcaatggagatatccgctgtggagggggactgcacgttccatccgagcaggatgtagcaggccagggccagcagggcggcggggagcgccaccttcatgttggcccggaatttgtcccgcatggcgcagccctgcgtacgggtggcggcgatcgtggtgtctgaaatgaaggaaagattgtctccgaagaatgctccccccaccacaatggccgtcatcatgccggcgctgacctgcgtggcctgtgccagccctgtggctacgggagccagagcgacaatggtgcctacggatgttcctacggagagggagatgaaacaggaggcgatgaacacgctggcaagcagcagattgtccggaagaagccgcagcgtaagctgcacggtggcgtcaatggctcccatatccctggcagactgggcgaaggctcctgccagcacgaaaatccagaccatcatcaggatgttccggttggccactccggaggaaaacagatccacccgttccgccatgctttttccgcgagtgatgaaaacggcccagacagctgccgccataaaggctaccgtgaccggcacggcgtaaaaatcctgtacggctatggagatgaccaggtaaagcaggaagaaaaccagcaggggactcagcgcccacaggctggctttggcggggggcgtatcctggttgtccggggggctggtcatggagttgaggggatctggccgaaaagtcagttgccgacggcttccatccggctcagataccaccggtaaatgcgttccactccctcttccagctccacccggtgtttccagcccagggaatgcagcttggagacgtccgtcagcttgcgcatggtgccgtccggcttgtctgcgttgaacgccagatttccccggtaccctgccgtagcggcaatcaggcgggccagtccgccgatggagatttctttcccggtgccgatattgatgtggcagttccgcacttcccttcctccttcttgcagctggctgaaatccacttgctccatcacatggacgcaggcgtccgccatgtcttcgctccacaggaattcgcgcaggggagttcctgtaccccacagttccacggaaccgggggtaatgccgtatttgaccagcacggccaggatttccttttcttcacccgtgccgtccacctgttccactgggcgcgcgttcagatctttccgcacggcgttccagtctccctccatcaggcacttggccaggtgtatcttgcgtaccatggcgggcagcacgtggctgttttccaggtggaaattgtcattggggccgtacagatttgtaggcatgacggcgatgtagttggtaccgtattgcaggttgaagctttcgcacattttcagccctgctattttggcaatggcatagggttcgttggtgtattccagcggggaggtgagcagggcggtttccttcatgggctggggggcttcgcgcgggtagatgcaggtgctccccaggaagaggagcttggatacgccatgccggaagctttccccgatgacgttctgctgaatctgaaggttgcggaagatgaagtccgcccggtagcgggagttggcgatgatgccgcccacaaacgccgctgccagaaagacgtattccggcttttcccggtcaaaaaactcccggacggccgcagggtcttccagatccagttctttgtgcgtccggccaatcaggtaggaatagcctttgttttccagggatttccagatggcggaaccgacgaggccgcggtgtccggccacaaagattctgctgttttttttcatctcagaaatgaacgggagtttttacgtatttcatgtcgtggcgcaccatgatgcgcacgagttcctcaaacggagtggaggtagggttccagccaagaagggttttggccttggttgggtctcccaacagttgttcaacttcggcagggcggaaatatttggggtccacttccaccagaatattgcccgtcttcctgtcgcgtccgcgttcttccacgccttctccctcccatcccagctctattccggcctcacggaaggccagcgtgcagaattccctgaccgtgtgcatttcccctgtggcgatgacgaaatcctccggtgtgtcatgctggagaatcagccacatgcattccacgtaatccttggcgtaaccccagtcgcgcagggcgttcaggttgcccaggtaaagcttgtcctgcatgccctgggcaatgcgtgccgccgccagcgtgattttgcgggtaacgaatttttctccgcggcgttcgctttcgtggttgaacaggatgccgttaacggcaaacatattgtaagattcccggtaattcttggtaatccagaatccgtattgcttggctacgccgtagggtgaacgggggtaaaacggcgtggtttccttctgggggacttcctgcaccagcccgaaaagctcggacgtggaagcctggtagatgcggcatttcttttccatgcccagaatgcggacggcttccagcatgcggagggttcccacggcatccgtttccgccgtgtattccggtacgtcaaagctgactttcacatggctctgggctgccagattgtagatttcatccggctgcacggtctggatgatgcggatgagagaactggaatccgtcatgtccccgtagtggaggttaatcaggcggtttttcttcatgtcccgcacccattcgtccaggtaaaggtgttcgatgcggcccgtgttgaaggaggaggaccggcgcaggatgccgtgtacttcataccctttgtcaatcaggaactctgcgagaaaggaaccgtcctgtcccgtaataccggagattaatgcgattttgctcatatggtgtgtcaggttatttgctggcgggagaggttgatgaaatgaaaagaaacctctcccggagccgcaattcatgggctccgggcataaataacgcatttttcccagcgaggcgaggaaaatgctctggtctataggaagggggggcggagccgtcagcgggcatgttgccgcttgccggccgcaatcattttcctgaaatcccggaacagatactggggatccctggggccgggtgccgcttccgggtggtattgcacgctgaatacgggaagcgtcctgtgggcgatgccttccacggtattgtcattcagattgatcagcgttatttccacgttgtccggcacggtgtccggatccacggcaaaaccgtggttctgggacgtaatgctgattttacccgttttcaaatctttgaccggatggttcgctccacggtgcccgaacttcagcttgaaggttttcgctcccagcgcgtgggaaataatctggtggcccaggcagatgccgaacatgggcactttcccaatcaatgcagctacttcccggtgaatgtccgtcagcgtggcgggatctcccggaccattggaaagaaagacgccgtccgggttcatggcaagcacttcctccgccgtcgtgtgggcgggaactacggttacgcggaagccgttttccctcaactggcgcaggatgttgtatttaatgccgaagtcaaaggcgacgatgtcgtattccgcagggggcagagtttttcccgtaaccagcgcgtccacttcctccggtgtcatggggtgggaaccgattttgtccacgatattgcagccttccatggagggggcgtttctggctgcttccacggcttcctccggcgtcagctccgtggtgaggcaggcgcgcatggctccggcggagcgcagatgcttggcgattttgcgagtatccaccccttcaatgccgatgacgccctgtttttccagccacgggcccagggattccgtggcacgccagttggagtggactttcgccagttccgccaccacaaaaccgctgacctgcgctttgcctgattccccgtcttccgggttgacgccgtaattgccgatcagaggataagtcatggtgacgatctggccgctgtaggacggatccgtcaatacttcctgatagccggtcatggacgtgttgaagcaggcttcccccacttccgtgcccgtggccccgaagtgcgaaccgatgaagacgcttccgtcttccagtgcgagaatggctctcatggtgatgtaagtatgctgtaggtggtgcgggattaaaggttttgggcgtggtactcctgaatagtgcacacctgaagatttttgttcttcagcgcctcaatggcattcacgcaggcctgtgcggaagccaggttggtgcaataggaggttttggcggcaatggcggaggaacggatgatgatgtcgtccgcccgtgcgtcgtgggagccgggggtgttgatgatgaaatcaatatccccgtttttaatatggtccacgatgttggggcggcgcgcctcgttgactttgtaggcgcgttcgcattcaatgtcgtgctggagcaggtgaatcatcgtgccgcgcgtggcgcacagcgtgaatcccatgtccgccagttgccgggccatgtgaagcacccgttccttgtcccggtcattcacggagatgaagactttgccttccgtcggcaggggattgaatgcactgacctgggattttgcgaaagcgatatccgggtccggatcaatgcccatcacctctccggtggatttcatttccggccccagcaccacgtcgatgcccgggaagcggccccatgggaaaacggcttccttcacgcaatagtattccggagtgatttcccgggtaaagcccagttccgccagcgttttgccggccatgacctgtgcggccagcttggcgaggggcttgccgatggatttggagacgaacggaacggtgcgggaggcgcgcggattcacctcaatgacgtaaagctgttcatcttttacggcaaactggatgttcatcagcccgcagacgttcagtttgcttgccagctccttggaagcccgcgtgatttccttgtgcattttcatggaaattcccatggcgggaatcatgctggcggaatcccctgaatggatgcctgccggttccacatgctgcatgatggctccgatgacggcgcgctccctgtccgcgatgacatccacgtcaatctctacggcattttccaggaagcggtcaatcagaacggggcgttcctcggaagcttccacggcttcattcatgtaccggcgcagttctttttcctcatatacgatgatcatgccgcgtccgcccagcacgaaggaggggcgcagcagcaccgggtaaccgatgcgcgcggcaatggcggcggcgtcctccacattggtggctgttcctgcctccgcctgtttcagccccagctccttcaacagggcggaaaaatgttcgcggtcttccgccaggtcaatggccctggggctggtgccgataataggcacgccgtgggcttccagcgcattggccaggttcagcggcgtctgtcctccgaactggacgatgacgccgtccggcttctcctgctcgcagatatggagcacgtcttccagcgtcaggggttcaaagaaaagcttgtcggaggaatcatagtccgtggagacggtttccgggttggagttcacgatgatggtttcatagcccatttcccgcagagccatggaggcgtgcacgcagcagtagtcgaactcaatcccctggccaatgcggtttgggccgccgcccaggatgaggatttttttcctgcctgtttcgcgggcttcattttcatctccataggtggaataaaagtagggggtgtaggcttcgaattccgcggcgcaggtatccaccagccggtatccgggcacaatgccctgttcctggcgttccttccggatgttttcttccgtggttccccgggccagggcgatctgcctatcggaaaagcccagcttcttggcttcccgcagatccagcttgtccaggctgtctcccgccttggccaggtcctgcatttgtgccaggaaccagggatcaatctgggtaagctgctgcacttcatccagggaaaatccgttgctgaacgccgtttgaatccagaaaatgcgttctgccgtgggaacagccagtttccgcgtgatttcttctgcggaaggcgcctgcggggccttcgcgtcaaatccccagccccagcgtcccgtttccagggaacgcaaggccttttgcagggattccttgaaagtacgaccgatggccatggcctcccctacggatttcatggacgtggtcaggtgttcgtccgcctgcttgaacttttcaaacgtgaagcggggaaccttggtaaccacatagtcgatggtgggctcaaagcaggcgggcgtttccctcgtgatgtcattccgcaattcgtccagcgtatagcctacggccagtttggcggccagtttggcaatggggaaccctgtggccttggaagccagcgcggaagagcgggaaacgcgggggttcatttcaatgacaatcatgcggccgttggccggattaatggcgaactggatgttggaaccgcccgtttccaccccgatctcccggatgacggcaaaagaagcgtccctcatggcctggtattctcggtccgtgagtgtctggatgggggctacggtgatggaatccccggtatgcacgcccatggggtcgatgttctcaatggagcaaatgacgacgcaattgtccgcgcggtccctcattacttccatttcaaactctttccagccgatcagggactcttcaatcaggatttcggaaacgggggaaagatccagcccccgggcgcatatctcttcaaattccgttttgttgtacgctactccgcctcccatgccgcccagcgtaaaggcggggcggacaatcaggggaaaggtgccaatatccccggccacccggcgcgcttcctccatggtatgcgcaatgccggaacgcggcacgtccaggccaatgcggagcatggcttccttgaacaggttgcggtcctccccgcggtcaatggcgtctgcgttggcaccgatcatacgcaccttttccctttccagcacgccgctgcggtgcagttccatggcgcagttcagggctgtctgcccgcccagggtcgggaggagggcatccggtttttcccggatgatgattttctccacgaactccggagtaatcggttcaatataagtgcgcggagctgtctccgggtccgtcatgatggtggcgggattggagttgaccagcactacttcataaccctcttcccggagggctttgcaggcctgggtgccggagtagtcgaattcgcagccctggccgatgacgatcgggccggacccgatcacgagaatctttttgatggaggtgtctttaggcataatggcgatggaagaatcctgtagtcctggaccgcggatttccgccgggggaattaagtgcccgccgggctccggaggaaagtttttttacggtcaatgacgcggatttttagagcgtggggaacggtggaaaacggagtaggaaggaggccggaacaaggcgcgccaaggctccggagccgtgccttccctgcgggcagaggcttgacccgcgaggggggcggcacaactccggagctcgtcggtgcacccactaatagatgaacagcatttcccggtacttggggagaggccaggaccggtcgttcaccagggtttctgcggcatcgacgctggttctcaatcgggacatcgcggcaaggatgtcctcatggcagctcgtaagcgccgtctccagggtatccaggtcggatacgatggaatccagggcgtcgcccagcttgtccgccagcttctgcagggcggaggtaccgttggtccgcctggcttccagcgccctggagagcgcggcgacggtttgcccgtattcgttacgcagggcgggtaggatgatggtggccgccatttcccaggacaggcgcccttcaatgcggatgcgtctgtggtattcttccaggaaaatctcaaacctggattccagctcccgcctggaaaagacgccgtacttttcaaacagggccacattcttttcattcaccagggtgtgaagggccgtcatcgtatttttcaggttggggaggccgcggcgttccgcttctttcacccattcttccgaataattgtccccgttgaagatgattctcttgtgttcggaaatcctgcgcttgagcgtttcctggagctgcggcaggaatgtttccggagcgaaggaggaaagttcttccgccagggaatcaagggattccgccacaatggtgttcagggtcatcatggggcccgcgcaggattgggcggagcccggagcacggaattcaaacttgttgccggtgaaggcaaacgggctggtgcgattgcggtccgtcgcatcccggggaagaacgggaagcgtgtctacgccgatcttgagcgtatcgttgcgcttgccgcagccggaagagccgttgatcatattctcaatcacttcattgagctgggcgcccaggaagatggagataatggcgggaggcgcttcgtttgctcccaggcggtggtcgttcccggcgctggccacggaattgcgcagcaggtcgctgtgcttgtcaacggcctcgatgatggcggtcaggacggtcaggaaaatggcgttctgctgcgggtccgaaccggggtccagcaggtttttgttcccgtaggaaatggaccagttgttatgcttgccggaaccgttgacgcctgcgaagggtttttcatgaagcaggcataccaggccgtgcttgctggcctgctggcgcagaacttccatcaccagcatgttgtggtcgatcgccaagttcacgtcctcaaacaaaggagccagttcaaactgagcgggcgccacttcgttgtggcgggtcttggccgggattcccagtctccagagttccagttccacgtcgctcatgaaattaaggatacggggcttgatggagccgaaataatggtcttccagctgctggtgcttggcgggaggggcgccgaaaagggtgcgccccgtctggaccaggtccgggcggttcaggtagaagttcttgtcaatgaggaagtattcctgttcaggccccagcgtaatggtcacgtgttcatccggaaggccaaaactcttcatcagcttcttgacggcattgcccaatgcctggcgggagcgcagcagcggagtcttcttatccagcgcgtctcccgtataagaacagtaggcggtagggatgcagagcgtggctccgttcccgtgcctcttgataaaggcggggctggtagggtcccatgcggtgtagccgcgggcctcaaaggtgcagcgcaaaccgccggaggggaagctggaggcgtccggttcgctcacaatcaggtttttgccggaaaagctcatgatgggttccattcccttgggatccaggaaggaatcgtgcttctccgccgtggagcccgtcatgggctggaaccagtgcgtatagtgagtggctccccgttccagagcccactgcttcatggcgtgggctacatccgcggcaatatccgcgttcagcggaagcccgtcctggatagtggccaggagggtttttgccgtgtctttgggcaggtacttcttcatcacttccgtgctgaagacatcctctccgtaataatcaatgctgaccggagcgctctcgcttgctccgcccacgggcagggaagcgatggcgctgatggcttgtgttcgtgttgagtcactcatcatggttaactgttgtgccttttctccagcaagaagcgtgccaacttttcaggtaaactttcgcatgaatgtgttgttcattttaatatattgattattagttaaatatgaatatcatgacggaagagctgcaaaaaaggaaaacaaaactgcgaacaagaatggattacaaaaatgtaaaaccgcaacaaaaggatgattacgaaaatgtaaaaaattcttcttggaagaaaaatatttttcattccgctgcaaaatgtcctgttgtgccggacgccgcgtcaggctctgtaaaacagggacaaagcagtttgaaagcgggaaaatatgaagtgtggacaatattggcacggtttttgctgcaaataagtcagcttaacccaaacaaaacagcaaactgatgaatagcgatcaattcgagacaggcattcctgcgccgcagggattgtatgactttgaacaggagagggacgcctgcggcgtgggcctggtggctgacctgaagaatgaaccgagccacaaaatcattgaaatggggattactgtcctcaagaggctcatgcaccgcggcgccgtggggagcgatccggataccggggacggcgcaggcattctgctggcccttccggatgaattcttccgcctggttcttcccaacaagcttcccgccagaggcaaatacggagtggccatgatgtttggcggatgcggccatgaagaggaattggaagccgccgttacggaaaacggcggcagcgtgattgcgtggaggcaggttcccgtggaccgggacagcatcggcaaaaatgcccagcgcacgtgccccctgatccgtcagctgttcattgacggcagcggttttgcggaccaggcggaatttgaacgcaaactgttcgtgatgcgccgggaaatggaacggcgcgtggaaggctgttatgtgtgcagctgttccagccgaagcattgtgtacaaggggctgtttctcggcacgcagattgaaggattttatggagacctggccagcgagcatttcaaatctcccctggccctcgtccaccagcgctacagcacgaatactttcccaacctggagcctggcccatcccttcaggtatctggcccacaacggggaaatcaacactctgcgcgggaacctgaaccacctgagcgtgcgtgagccgcatttgtcctccaccctgttgggggatgacctgcaaaagctgctgcctcttattccccccggccagagcgattccgcctgcctggacaacatggttgagctgctggccgccgccgggcgggacttgcgccatgtcatgctcatgctcatgccgcaggcctggggcgtcaactaccatttagggccggatgtacgcggcttctttgaataccactccgccatgatggagccctgggacggcccgaccgccgtcgttttttccgatggtatcaatgcgggcgccatgctggaccgcaacggcctgcgccctgcgcgctatacgctgaccacggatgacattttcattctggcttcggaaacgggcgtagctgatattcccgcggaaaaagtagcccgcaaaggccgcctccgtcccggggaaatgatttactgcgacctggtgaaccaccggctggtatccgatgctgaaaccaagaatgaaatggccaggcgcatgccctaccgccgctgggtggagaaaaacaagatttccgtccgttccctgtttgattccatttccgcctctgcggaaatgccggacctcgtgggccgccagcgccagttcggattcactcaggaggatgtggagctgattatccgccccatgatgctgaaaggcgcggagcctctcggctccatgggaaatgacgcgccgctggccgtcctctccggaaaggcgcctctcctgttcaattatttcaagcagctgtttgcccaggtgaccaatccgcccatcgaccccatccgggaggaactggtcatgagcctgactacatacataggcaaccatcccaacattctggaagaaacgccggagcacgcccggctgatcaagatggcgcgccccgtcattacggatgaagaactcaaccgcctctgcaatattcgggaggccggcttcccttccgcaaggcttcccctccagttcccggaaggcggggacgggaaagccctgcgggagacgctggaaagcctggcggaatccgccgtgggcctggtcaggtccggcgtgcgcattctggtgctgacggaccgcaacatagggcacggctaccttcccgttcccagccttttggcctgttccgtggtgaaccgcgcgctggcgactgccgggctgcgttccgacgtcgggctgattctggaaaccggggaggcgagggaaacaatgcactttgcgctgcttctgggcttcggggccacggcggtcaatccgtacctggctctggcgacggttacttccctggccgcaccgcaggactgccctctggatgtagtgaaagcctccggaaactacatcaatgccatagacaagggactgcttaaaatcatgtccaagatgggcatttccacgttgcgcagctaccgctcctcccaactgttcgaggcggtgggtctgaaccgggaactgattgacgaattctttcccggcaccgtcagccgcgtaggaggcatagggctggatgaaatagccgcggaatgcaaccagcgcgccgcgcaaaacgcggaacacggggacaagctggatgcgggagggcagtacaagtataagaaaggaggggagaaccatctctggaatccgcagacacttcaggctttccgcgctgccgtgcgtgacaatgacgaacggaaataccgggaattcgcggattacagcaaccgtcaggcgcagcatctctgcactttgcgcggcctgtttgaatttgctccggcggatgctatccccctggaagaagtggaaagcgtggattccattttgcgccgtttcgtttccggagccatgtctttgggttccctcagcccggaagcccatgaaaccatcgccattgcgatgaataaaatcggagccaaaagcaattccggggaagggggggaagatgaagcccgctatgaacccaacgcccggggcgaagtccgctacagcgccatcaagcaggtggcaagcgggcgttttggcgtgaccattaattatctgcgccatgcttccgagctccagattaagatggcccagggagccaagcccggggaaggggggcagctcccggcgcacaaggtggatccatacatcgcccggctgcgccattccatgccgaacgtcagcctcatctctcctcctccgcatcatgacatttactccattgaagacctggcccagttaatttacgatctgcgcaactccaatccggatgcccgtgtttccgtcaagcttgtttccgaggtgggcatcggcgcggttgccgcgggggtggtgaaggcccatgcggatgtggttgtggtcagcggccacgacggcggcacgggcgcctctccgctcaccagcgtgaagcacgccgggctgccgtgggagctggggctggcggaaacgcagcagacgctggtgctcaacaaactccgttcccgcgtccggctccaggtggacggccagctgcgcaccgggagggacgtcgtgatggccgccctgctgggggcggaggaattcggtttcggaaccgccatcctggtctccatcggctgcgccatgctccgcaggtgccacgaaaatacgtgcccggtaggcgtcgccacgcaggatccggccctgagggccaaattcagcggcaagccggaatacgtcatcaactacctccgcttcgtggcccaggaaacgcgggaaatcctggcttccctggggcttcgttccctggatgaagccgtaggcagggcggatctgctttccgtaaaccgcgccatagatttttacaaggcccggcatttggacttttcctccatcctgcatgcggcagagggggacggacgcaggtttgactcctcttttgaaaaggaaccgctggacaactacgaccgccgccatctgctgccggcattaaagcccctgctggaaaagggggaaaagacggaactctgccgcgacgtccgcaatgtggaccggacggtagggacggaactttccggtgagctggtgatgaaattcgggccgcgcggcctggcggaagatacgcttacggtgcacttcaccggatgtgcggggcaaagcttcggggcttttctggctcccggcgttacctttgaacttgtcggggaggcgaatgactttgtcgggaagggcctgtccggcggcaaaatcatcgtgcgtcccccggatcatatctcctacgtaccgtcggacaacgtcatcgccggaaacgtcatcggctatggggccacttccggcagcatcttccttcacgggcaggccggggaacgtttcgccatccgcaacagcggcgccaaaatggtggtggaaggcattggcgaccacggctgtgaatacatgaccgggggccgtgtggcggttctcggcaaggtgggcgtcaatttcgccgcggggatgaccggcggcctggcctacgtgtatgatgcggacaacaacttcgatcagaaatgcaatctgggcagcgtggacctggaaacggtcatgccgcattccgccgatgaagcggaattgcttcagcttatttacgagcattatatggctaccaggagccgcagggcttatgacctgttaaacaactggccggaagaacgcggcaaattcatcaaggtattcccggtggaataccggcatgccctggccatgcattcctgaaagaagcatgcagcagttttctgttgtttggggtaaggcaggggcctccgcgggtgcggaggcccccattttttcagaggcctgcctgctgtttcatggccgggcattttggcgccgcttttcctccttgagccattccgcatttgaagctggcaatttgcctgtccggcggcatttcggaggctgttccgttcgtttgccgggtaacggccgttccggctgccggacatttggagacgaatgttccggataagaaggtttttatgaccgtgctgtcagttgataaagaaatgcagctacatggatggggatggtagttgcggttgatgtcaggaggaaggtcaaatgttccggcaatgcccggttctgagcggattatgaattcgaagtcaacaggaaagtttgaatggaaatgtgttagtggagtttgggttttggaaattcggctggatggaaattgataaaaaagtgaattgaaaggtaactgattggtattcttgttatttagttattcagggaattgccgcgaattcataatccgttaggtttgctccagtgggtgtttggcattttctgccaagctgctccaattaactacgcaatgaatatatgacgaggaaaaccggccctctccacctggagagggcctgttttttgaggaaattctgtaagggagttcctttcccttttttgaggcttgcgccggcagaatattttttcctgcgcctttccatgaaaaagtgcggccgcggaggggcggacgcacttgcggagacggaaggcagagcagggattcctactttttaggcgttatattgcgcatgttgcgacctttagctttgcgctgctgttcttccagggccgcacgctgctgctccatcattttttggaaaaagcccgactttttctttttggcgggggaaagcacgggcatgggcaagcggcggataagggccgtttgtcctatggagatcaaattctgcgtggtccagtacagggccagggcggaagcgaaattgtaacagaacaggaagaacatcacaggcatcaggttcataataatgcgctgggagcgttcccccgcctgaggcgtcatcctcatctggataatcatggttacggccatgatgagaggcagaatattgattggaacgccgaacaggtggcccacggtatcaggcagggaaaggtccgtcatccacaggcagaagggctgccccctcagttctgcggaatactggagcacacggtaaaaggcaaagaaaatgggaatctggataagcatggggacgcagccgctggccgggttgatgccgtatttctggtacagcttcatcatttccatgttcaccttctgagggtcgtccggatatttctccttgagtttgaccatctccggctgaaccagggacatgcgtttcatggccatgtaggattttttgtgcagcggccagatgagagcacggacaacgatggtcatgcagatgatggccacgccccagttgccgaaccatccgtggaagaggttgagcagccagttcatcggaacgctcaggaatacgagccagccgtatgccatgatatcgctgatggcgggataggaaagattcaggtcacgcaggtaggcgttgaatttggggccggtgtaaatatcgtaggtgagcgtcttgatttcattgggggccatggtcagattggggattcccatggccacggtgacgccgggcaccagggtgttgccttcatgcgtcagagggaattcctggcgggtggcgtacacggtggaccccctggactggtcctggggaagaaggatggtggcgtaatactggctcatgacgccggcataagtcaggtcctggagagggccttccaggacgcgggccttggcgctgctgaaaaagccgcctgtgaaataggaaggcacttcctgttccagagagccgtctgcatggtaaaagaaatgggtgtaggtatcttttggttcgcttttggcgataggataggcgctcccgccgaagatgcccatgtagcgcagatcctggacattgggagatttattgagcagggagacggtcaggcgaatgagatatttgctgccgggcaatatttcaccttccagatttttgacggggtgcagggtgtacgtttttgagatgaaaagctgccgtgcggggtcatagccttccagggttacggagtccgccgtgcgtttcacttccttatacacggtgttgtcataggaaggatcctgggtggcatccatgttgaaaacgagttctccgatgccccgttgctgggcttcgttaatcgtgatattatggtccgcgactttttgggagtccacaatatcgttgtgcagggtaaccgtgccgatggaaccccctatgcggttgaacgtgtaagtgatgaagggttgctgcttcccgttcacttcctgcgtggctaccagagtgatcggggcggttttgtcttcttcaagggctttgttgacggaggcctgttccggggcggaggttccggctccggggcggacgccggcaaccggggcattggctgcggcgacagccgtctgcggtgcgggaatgggggcggtttcagcctttttattgttgcccatgtaaatattcaggcccagaagggcggcgcagatgcctatgatgatccatgctgtgcgatccataatgtgatatagcttgattggagttggtgaaaggaaagggaaagaaaggtaattgttcagcgtgggtggcgcgccgggggcacgggatcataacctgatccgccccacgggttgcatcttaaaatacgccatgtgccaagaagaaagccgcgccaggctccgtggatgtgaacggcctggatgaagtactgggaacaagtgggtgtatagcggcagccgcttccggggccccccagggcatgcaggggagcgctgatgaaggtttggtatccctttacaagggtgatgagcagccatttcatcatgtcttgtcttgttcccgggaaagaagttgcaatttgagttttcgggcggctttccgccagtcccgttccaggtcggcgtagctggcttccacggccctccagcggaggacgcacaccaggtgtacgccgttttcaaaaggagccccgtgcgccctcagtatttccctcacgcgtctccgcagtttgttgcggacaacggcacagccgatttttttcgtacagatgataccgaatttggagggttcctccggatgttccaaaggggtcgcgcttaaaacaataagccgacctgctacggatggcccctcgttacgtacccgggcaaattggaatgccctggtcatgctttgttgacgagtaagacgcatctcccgcgggtcggcccgtgaaaagaagttccaaggaggcgttaaccgaatcctggcggctggattaacggccgtgctggatggtgtggcgcttgtactggatttcggctcccttgggaagcaggcgcttgcggcctttagcgcggcggcggcggatgatgtccgctccgttcttggtggccatgcgtgcacggaatccgaactgacgcttgcggcaacgcttggatggttgataagtcctcttgctcatgatgttgaaagatgcttcttgtgaattactagattcagtgccgtccgtctaagcggcctatgcacaaccggacgaaaaggataactattttgattgttttgtcaatccgtcaggcgattaatttgccgtttttcttgcggaaagcactgggataagtagtctttatgattgatagacagtgtttttctattccagaaaagcccgcctgctttacagaaagagcagttccgcgtatgtggggacgggccacaggtctgcgtccgtcaggctttccagcatatcaatggtgcttctcaaattgtccatgcccgtctggatggccctggtatcggcttcatccacggcgcggcgcagttccctcacctgtccggggagaatatccagcagcgtgccgatttggttggcgcgatccgtagtagctttcattcccgccttgattccggatgccttcatctgggcaatggcggtggtaagctgcgtgagctgttccgttacggcggggatgtaaagggtttccaccatcaggagggccgtttccgcttcaatgttgatttccttgtggaatatttccgtctggatttcatggcgggcgtggagttctacggggctgaccactttgtacttttcaaaaagcgccttggccttgggcgtttccagagcggccagggcttcaatggtgccggggatgttggggagattgcggcgttccgcttcctctacccaggcttctccgtagccgtctccgctgaatagaatgcgcttatgcttcttgatgatgttttgaaggagcttgttgagggtggcgtggaactcctcgggcttgtccttgacaggttccaggatggtgcagatttcatccaggctttccgccacaatggtattgagcaccgtcatgggccatgcacaggtttgggaggaacctacggcgcggaattcgaatttattgcctgtgaaggcaaacgggctggtgcggttccggtcggaggcgtccagggggaacatgggcagggtgtccacgccgatgttgatggtcttttgggtgcgcgcttttttagtgcctcctttctcgatttgctcaatgatttcatccagcagatctcccaggaagatggaaatgatggccgggggggcttcatgggcccccaggcggtgttcattgccggatttggcgacggaggcgcgcagcagatccgcatgttcgtccacggccttgatggtggcgcagagcagagtgaggaagatggcgttttcctgcgggctggaaccgggattgagcaggctgccgtaaccgggggcggagagggaccagttgttgtgcttgccggagccgttcatgccggagaagggcttttcatgcagcaggcagaccatgtcatgcttgttggcagttttccggagcacctccatgaccagcatattatggtccacggccaggttctggctttcaaaaatgggtgcgatctcaaactggccgggagcgacttcattgtggcgcgttttggccgggatgccgagtttccaaagggcttcgtccacgtccaccatgaattccagcacgcggtccttgatggagccgaagtagtggtcttccatctgctggtgcttggggggcacattgccgaagagggtgcgcccgcacatcatcaggtccgggcgcagggcataaagctgcttgtccaccaggaagtattcctgttccgcccccaggtcggcgctgacgtgaatgttgtccggaccgccaaagcaggacaacagccgcttggcctgccgggtgacagcagtcatggatctcaggagaggcgtctttttgtccagcgcctgtcccttgtaagagcagaaagcggttgggatgcaaagcgtggcgccgttttccgtccgtttgataaaggcggggctggtggggtcccatgcggtgtagccgcgcgcttcaaaggtggcgcggagacctccggaagggaagctggaggcgtccggctcgccctgcaccaggctcttgccggaaaatttgagttccagatttccctccgggtccacgtccacaaaggagtcgtgcttttccgccgtgctcccattgagaggctggaaccagtgcgtgtagtggctggcccccttttccagagcccacgtcatcatggcctgagccacttcattggcgatgtcggggtccagtttttcgtccttgcggatggtagccagcagttttttgtaaacggggcggggcaggtaattgcgcatggtctccatgttgaagacatcctgaccgtaaatttccgcaataaaggttgcggcgttgccaacatcggaaggtgggtttgtatgcatcttgatagggaacgcgccaaaaggctcggaacataccaaaccttaaaagagactttttggcaagccgaatcctgccctatttcttcaggaaaaggacttcttccgcccccatccgttttcgggaagaagcgtaaacggttttccggtttctatggttctccggcggcaatggagaaattggggaaggagggggacgctgtaaaggaagggataggccgtgattgtcgggaagaggactggacgggaattggtgaagtgccgggtttttgtttcatgaaacggcacaggaacctgccgagcggtatttttccgtatcttgcaagaaatctatttcgttttcagtagtaataagtacaaccatattattgtgaaatgcgtttattgttaatagcaagatgtttattgttgatgctgctgtgttgtgcgggagtggggatgcggcttcatgcccagcctttgaataagggccggattgccattcttggggacagtattgcttatgcgggaccatgggcaaatgaggtggaaaacgccttgaaagccgataaaaagtttgaggcctgcgagattgtcaactttgccgttcccagcgagacggtagccgggttgagcgagtatggccatgcgggtggcagattcccccgtccatgcctgcatgagtgccttgaccgggttctccaaatgtaccggccccaattgattctggcatgctacgggatgaatgacggccttatgcaggcgtttgacaaagcgcgttttcaagcgtaccaggaagggaatatccgccttaaaaaggctgccgatgcggcaaaagcggagattgtcttcattactcctccattgttccggggggattccgctgagcaggctgagtatgacgctgtattggacaagtacgcggaatggctggtttctaaaagaaaagacggctggaaagtcatagatatccgtcccgggcttcggaagctcattgccagagagaaggccgggaatcccggtttcaggtattccggtgacggcgtgcaccccggtccggaagggcatcatatgatagcccgggaagttcttgccgggctggtcccggaaataggccttgctcctgaggttgcggaaaaagaccatcggccgacgccggatacgatgaaaaaacatgagaaagtccgcaatgaatggctggtaaaaacaggacatgcacggccggaaattccggggtatgatccggaaatggccaagcgtcagtttcctaggacggtttctgtctggaatggttttttacgggaggagtttaccgtgggcggccgcagggcattcatcgtctttcccgacaaggctgttgtttctggaaaagaacagttatggatatggcggccacaattttttgattataagcctatagctgatctcgaactggtaaagcgcggctatgcggcggtatttatcagcatggaagacctttacggttctcccaaggccatggaggtgatggatcaattttacaggtatctggtggatgaacgcaaattttccggaaaaccggtgttgtttggactgagtcgtggaggactttatgctctgaactgggcggagaagaatcctttgtgcgtggctggcgtttatgtggatgcccccgtctgtgatttcaaaagctggccggccgacagaggcaagggcaaaggttcgccggatgactggaacaaatgcctgcgcgcctatggctttaatgaacagcaggctttatcctataagggcaatcccgtggacaatatgcgcggcatggctaaagccggaattcctttgttgtttatttcccggacggaagatgatgtagtccctattgaagagaatacggatgttttcgccaaacgttacgccaagctgggaggccctgtaaaagttattcgccgccccggcgggcaccatccgcacggttttgacaatcctgcccatatcgtagattttgttctttccgttaccggacagcccgtccctttgcgcgttgcgtgcctgggagacagtaatacttttggagcaggagtagccggagccaataaggatgttttgcgctggagccatcttcttggtcaagaattgaggaaaaaattcaaacggaaagaaatagaagtgctgaactgcggcgttaacgggcgtacccttctggccaagggagaccttccctatattaaaacaggcgagtaccggaatgctctcaattcccatgcacagattgccattatcgctttaggcaccaatgacgccaaaccgcagaacaggaaattcctgtccgagtttaagcagaattatgccgccatcatcgccgaactgcgggaaaatatgcccggcattcaaatctattgcgcaattcctcttccctcgtggcaatcttccagccaaattgacaaggaaacggtggaaactaagatcattcctcttgtgaagcaggttgcgagggacaataagtgtgaaaccatcgactttttctccccttttcagaataaaccggaacttttccccgatggcgttcatcccaatgccgatgggcaggtgattatggctgacattgcattcagggaacttctgaaaaaacaacctttaattcaataaacaaaaaaataatgatgagcgctaaactatcggtaattacaggttcgattctcctgctgtcagccccgttgcagggattttccgcgacaacccatccggattcctgcatgaaccgggattggaaaaaagagattccccttccggtgtatccaaaccgggaaatggtggatctttatcataagacatgggaaattgcggcaggccgcgtcagaaaagggccggaaggccttcccgcgtctccctacatggatgagaattgctatgaagatcaaatatggatatgggatacctgtttcatggttcttttcgccaagtatgctcccaggtcgtttcccggagttgaaagtttggataatctttacaagcctattcacgaaaaagccgttactccgcttaaggttcatttagtggacaatcccccgttatttgcgtgggtggagaaagaatattttgacttcaccggtgataaggaacgcctggatgatatcttgaataagaagcaatatctgcaaaagcatttcaaatggtttgcccgggctaaggctggtgaacggtttgagtgttccccccagcgtatttacttgaattccattggggatgatggctttacctggacagggggagcgagcggtatggacaatactccccgtgggcgtgatgccggaggataccataaggtgttatgggtggatgccatttcccagcaggctcttagcgcccactgcattgttgccatggaacaggctttgggaaatgaagatgaagcaaggaaatggaacgccgaatatgaagcgcttaagaaaaagatcaaccatctttactgggatgagcgggatggattttattacgatgtcaccattgcggacaaacagccctgccgcgttaaaaccattgcgtcctactggcctcttctggctcaggttgcctccagggaacaggcgcggagcatggtcaggcatttgatgaatcccgaagaattcggaggcagttatccgactccttccctggcccgctcggataaggattatcatcatcaaaccggggattactggcggggaggaatctggctgccgacgacatatatggcgattaaggccattgaaaagtatggctaccatgaggaggccgatgctattgccgagaaggttatcaaccagcagcttgccgcttacaggaacatagaaccgcatactatctgggagtgctacagcccaagcgggaatactccttccacggaacacggacgccgcgcaagaccggaattttgcggctggtcagccctggggccgatttccctgtttattgaaaatgtactgggatttaaggaggtgtccgcaaccagaaaagaagtgcggtggaggttgaagaaaaataagggccgccatggaatcaggaatttgaggtttggcgatattgtaaccgatattgtttttgatggtaaaggcacggtgtcggtcacgtcgaatgcttcttactctctaatcattaatggcaatacttattcagtaaggaagggggatactgaaattaagctgtaaggaccttctgtttatccacggaagggcgtcattgatgttcttccgcggggtttttccttttgccggggcaagatgcgggtttttcccgtgcctgcgccaatttttttcttttggaggcggtctgagaggcaagggtgacaaaggaaattccggaagggcggcaaggaaatgttccggaacattatttgagaggtaatgttgtctgccgttttaacggggagagcaggcttcctccatatgccttacggaaattttttggtaaagggtatgggtttgtccgggggcgagggaaatggaacggggctccgcgtttcccgtttcaatgcacaggaatttattccaggactccgcacccaggtccgccatgtttttggcgccctgttgtccaggattccagacgatgacggaagaggcatgattccgctccaccgtgatggcgcggttcagcatgaggtcttccagcattgtttttcccgaacaggaggggaagttgtaaacgcggtccagacaccccagcggcgccagcgggcgttctccgtgcttcatgggctgggcggcttcttcccggaacgggatgtcctccagcccatgaacgcggcatttggtcaggttgccgacggcaaagtagttgtggaaggcttccgtgagcttgcagggctgcgtgcgcgccgtggtttccagcttcatggtcagcgtgcggcccagggtaagacgcaggatggcggcgggataggattcatcttccggatagaaagccagggagagcaggacgttgccgcgcttgtccatttcctggtggtggaggcgccattccgaggtgcgcgctatgccgtgggacggcgcgccttcccggggaccgaaccagggccagcagacggggatgcctccgcggatggctttgccggggacaaaggctgcgttgggagaaagaaaaaggcattcctcatgccctgccggcttccatgaggtgaggtgcgctccctgaaggcacagggatgccgtgcagagcggtgttgttacgtccaggaaagaaagcccctggtttgttgtgcgccggacggtcatggctgaaggcgttcaattgtccaggagccgttttcctgaagtttgtacatgaaacggtcatgcacgcggccggggccgccctgccagaattcaaaggtatccgggataattcggtagccgccccagaaggagggaaggggtatttctcccttggagaatttgtttttcagttccatcaacttcatttccaacagttttcttccggaaatgacggagctttggtgtgaaacccaagctccaagctgggattccttggggcgggtgaggaaatatttcagggattccgcgcgggagactttgacggcttttccgtaaatgatgatctggcgttccagcattacccacggaagcatcatgcagacctgtggattttcttcaatatcgcgggccttgtggctgccgtagttggtgaagaaaacaaagcccgtccggtcaaaatatttgagcagcacggtgcgcagggagggcctgccctgggcgtccgccgtggccagggaaaaagcgttgggttccggaatatccgctttcagggcctgttcaaaccaggtttggaattgttcaaagggattttccgccaggtcctttctgtgcagctggcctttgaggtattcttctctgaaattggacaagtccatggcgtgttgaacgatgaggggttattctacgctgaaatccagccccaggtccagggagggggccgagtgggtcacgtagcctacggagacgaagtccacgccggattccgcaatggcggctaccgtatccagatgaacgcctccgctggcttccagcaggggggtggtgcgtcctccgcgcatggcgacggcttgtttcagcatttccggcgtcatgttgtccagaaggatatggtccacgccttccagtttaaggaagttgcccacctgttccagggtgtccgcttccagctggatttccacaccgggcttttcctgacgcagcctgttgatgcattcctggaggtgttccgtatttccatccgtcatcaggtggttgtctttcaccatggcgcggtcataaaggcccatgcggtggttggtgcctccgccatggagcacggccgctttttccagcagacggtagccgggagtggttttgcgggtatccagaatgcgggcgctggtgtgggaaacggctttcacatattgtctggtgagcgtagctactccggaaagacgctggatgaagttgagggcggtgcgttccgccccaagaatggagcgggcggaaccttcaataagcatcaccacggcgccgggcgccacggcttccccgtcatgcaggtaaacttccaccttcagggtgggatccaccttgcggaaaacttccgccgcgacattgacgccggaaagaacgccttttttccggggggtcaaaatagctctggctgtcagatgttccgggacgaagtatgtggaagtcacgtcgccggagccgaagtcttcggccagcgccagattgatcagggtttccacgttgtcggatacggtttctgcgggcatgaaagaaaagcggcttaatattcgcggttaagaagatagttggccagttccaccaggcgggcgcggcgttcttccgggaaaatcatcagggcatccagagccgcctgagtgcggcatttggcttcggaacgggcgccgtccaggccaatcagggccggacaggtggatttctgggaattgacgtccttgccggcggtcttgccgagtttttccgtggaagccgtcagatccagaatgtcgtcaatcacctggaaagccagccccaggttgtaaccgaagtccgtcagagcttccagctgggactccgtggcgtttgcggacatgccgccgaagcgaagggccgtggttagcagggcggccgtcttcccttcgtacacggtgcggacttccggttcggaaagctgcttgtgttctccctccaaatccagaatctggcctccgatgagcatggtgctgccgccggtggctgccagctccctcacgtaatccctgacggtatagcgttccgtatcgtccacctgggcgattacggcaaaagcctccgtcagcagcgcgtctcccgccaggatggcgacgccttctccgaaggccttgtggctggtgggtttcccacggcgcagatcgtcgttgtccatggctggcaggtcgtcatggatgagggaatacgtatgcatcatttccacggcgcaggcgggaaccaaggcgtccactgccagtcctccgcaggcctctgccgccgccaggcaaaggacggggcgcattcttttcccccccgcaaatatgctgtagcgcatggctttgtggatggtttcggggctttcgttctctgctggcagcagtctgtccagcgctgcgtcaatcagggcgcattgttctgtgatgtagtcgttcagtgattgttcacacatggcgttatggaataggtgcggggtgtggaggaaacaggtcagcggttgaccagcaattccgcgatttgtacggcgttgagcgcggccccttttcggacctgatcgcccacgacccagagagtcagggcattgtcaatcgccatgtccatgcgcatgcgccctacgtagcaggtatctccgttggtgctgtccagcggggtgggccacacgccctccgctgggttgtccatcagggcgactccgggtttgccttcataggcgctgcgggcagtttccaagtccacaggtttttcaaactgggcggtaacggagatggaatgggaacggtaaacgggcacgcgcacgcaggtgcatgttaccttgagttcgggcagggaaagaattttacggccttcattaagcatcttaagctcttccttggtatagccgttttccgtaaaggaatcgatctggggaagaagattgaaggctatctggtggggataaacatttttcactacgggatggccgtccactacggcgcgcacctgggtttccagttccgcaatgccgtgctggccgctgccggaaaccgcctgataactggaggcgatgacggttttcaacccgaaacgctgatgcagagggaagagggccatcagcgtaatgatggtggtgcagttcgggttggcgataatattgcgggggtggttgaaggccgcttccggattgatttccggcaccaccaggggcacgtccggctcctgccggaaggcggaggaattgtcaatgaccacacagcccgcagccgccgcgataggagcgaatttcagggaaatgcctccgcctgcgctgaacagggcgatatccaccccatcaaaggatttttccgtcaattcttctacagtcagcattttcccacggaaagcgacctgttttccggcggaccgggcggaggccagaagcttcagggaacctacgggaaaattgcgtgtttccaggcaggacaggatttcaacgcccaccgctccggtggcgccgacgatggcaacatggggtgcttggttcatgattgttgtcagaaaatgacggatattttccgtccgcccccattatacggcagcccggtcatatggcaatacgattgcaagccttcaggcttaaaaatgaaaaactgtccggggtgtagaatcccggacagttgttgaaaaacgggaaagatcgcgttttttatttcagcgcttgcggcgcagcatcagcagggacaggcccaaaaggctcagggatgccgtagccggttccggaacgacatcctcagcagtggctgacatggaaaaaagcaggttggagttcgtgtttccgccgccattgcgggtggacatcacaatgtaagccgtgtcgctggtaaggggagtaccgctcaagtccacggacagggtcatgcctgtttgaatcagggaagaggcctgaccggtcaactggctgatctgccagccttctgccgtctgataaacgatattgagcgtcgtgaagtttgctccggattgcagcccggcgcagtccacggaaagagtcaatccggtatagctggcgtaatcactggtaagcgttaccgctgttcctacgatagagccgccgtaagcatttctgttgatgaaagacacggatacatcagtatccccggatgcggtgacgctgccgtaaataccggaaccggaattgccgtttgcagtggtgccttgccagccggtggtgccttgcaaccatgtgacgactttttgtgcagtgatgacacttccgctgttgacgtttccgaatccagacaatttaaggtttgcaggcagagatgtcccttcggctgcctccccatttaggtcgattgctacggtggcggccatccctgcgccgcaacacaaagccataagaccggaaagaaataatgtgttcttcatggttgttcgttgctcttttttattgctgtaatttgccgggctgtcttgaacccgctcatgatgaataaagcggattttcaatccgatatgccctgaaaacagtgcatgagtttgtctttctgcagggtgcggactgtttcctgcggctgttgatacggacattcccggcagatgtatccacgctttcagggaaaagagttctccggttttgagactgatcttgagaagtctgaaaagctggcgagcggttttccctgcaagcgggtggatatttcgggaatggccgtttccgtatgcataaaaaggttttcaccatgatgcaagaaagttcaggcacaaattcttggttttcagaatttaggcttgacttccggattgaaaatccggcatatcctcactttccatgaaaggcaacaaaacaggctcccgattttagggagcctgtctttaaaggaaagagcggtgcaagcctgctatttaacccattttcccgcgccttccggcagcctgccgtcagagacggggccgtagcgggtggattccgtgttgccccagagggggacgcctacgatgcgtttccaccagcgggacatgctggctcccgtatagcagccgaagctccagcagtcggactgcggcgtgaaaatatcccgccgtatcctgttcaggtccgtctcatggatccattccgtggaaacggccatgatattgttgccgtagtccagcatccacgcatagcagttggaatggccgaagtagtaaaaggattccaccttgtcgccgtggaagcgcggggaggaattcagcgcccggatggcctggtcggcgctgtttacccagacgagcctgattttatacttggaagccaggtccgcaatccagcgggtgtaaggttttccgtcttccttcccccgggttgcgtaaccggggcggtaaacaatccaggtgattctggcggcaggatcttgctgctggatctgggcgatgcggatggtggaggcccttacaaagttggcccaccagttgtcatgcctgtcaggctgtattctcagcccttcccattgcctgagtgcggggccgccgcacatgacgacgtgaacggcccgggacagtcccgtgccgcccagcaacagggccagagcgagaaaaaggcgtgaaagcatgcccgcaccctacctttgctccccgtatctgtcaatccggcggagcgttttttgcgggaacagacgcgcgtgaaaagacaagggagggggttcatgtaccctcagcaattcaccacgttgacggccaagccgccctgggcggtctccttgtatttggattgcatgtcccttccggtgtccagcatggtgcggatgaccttgtccagcgggacaaaatgagcgcccgtaccgcccagggccatgcgggcggcgttgatggccttgatggcggcgatggcgttgcgctcaatgcagggtatctggacgaggcccgcaataggatcacaggtgaggcccagattgtgctccatgcctatttccgcggcgttttccacctggtggggtgttccccccaggtactccgcaagagcggcggcggccatggagcaggctacgcccacttctccctggcagcctacgtccgcgccggaaatggaggcgtttttcttgtacaggatggcgattcccccggcggtgagcaggaagcgatgcacggcatccggatacggggaaacgcagaatttggtggcgtagttaagaacggccggaacaattcccgccgctccattggtcggagcggtgacgatgcggccgccggccgcgttttcctcacttacggcaatggcgtacagattgatccagtccatgatagagagagggtctttcaaggctgattctccgtgcaccagaagattcttgcgcaaagttttggcccggcgcggaacctgcagaacgcccggcaggttgccgcgcgcgctcatgccgttggagatggactgcttcatcgtcgcccagatcaggtccagtttttcacggacttcccgttccgggagcatggcgcattcgttcgccatgacaatggaggaaagagggcatccgcgctcatcagccatgtgcagcagttcctccgcggattcataaggaaaaggaaaggtttcccggtccctttcttccggatgcagaagttcctgttcggaagagacgaacccgccccccgtggaataaaataccgcgtcttccaccgggtctccgtcctgattgacggcagtaaactgcatcccgttcggatgcaggcgcaggggctggtagtgggaaagatccaagtcgcgggaaggagagaagcggacgtttttttcttccgtgacggacaacgtttcctgctggtgcaggcgggcgatttttccgggaatgctgcgcggctccaccgtatggggttcttcccccagaagccccagcatgatggctgtgtctgtgccgtgcccatgtccggtggcggccagggagccatagcattcgcagcggatgcctgagatttccgccaagcgcggggagtggcgtatctgttcaagaaagcggtgcgccgcccgcatgggccctacggtatgggatgatgaaggacctatgccgatgctgaaaagctcaaaaatgctgtaatggtgcatgtccgttttcctgtagcggggaagggccggaaatcccgctgggaattccggcccttcccgaaagatgggtttacagccccagcaggtagcgttccgcttcaatcgcggcgctgcagcccattccggcggaagaaatggcctggcggtagtgaggatccgccacatctccggcggcgaacaatcccggcgtcctggtcgccatcatccctgttttccggataatgtagccggcatcgtcccggtccaccagatcccccaggaaagaagtgttcggcgtgtgcccgatcgccataaagacgcatttgacgggaagttccgtttcatccccttctactacgtccttcagcatgacggcttccagttctctcttgtcgtccgtcttatagcttacgatggtggaattccacatggggaaaatcttttcattggacagcgttcgttccgccatgattttggaagcgcggagcgtgtcgcggcggtggatcaggtacacccgggaagcgaagcgcgtcaggaacatggcttcttcacaggcgctgtctcctccgcctaccacgcacacaggcacgtcccggtaaaaagctccgtcacaggtggcgcaggcggtgagtccgtggccaaccagcccttcctctcccggtattcccagatagcgggcggatgctcccgtagccacaatgatactccgggtttcgtaattctggccgctggtcttcacggtgaacagtccagtggcttcatccctgacgacgctcttgacgtcctcatatgcaaaccgggtgccgaacttttccgcctgctgctgcatcaggaacatcaggtccggccccatcacgccgtccggaaagccggggaagttttccacttccgtcgtggtggtcagctgtccgccgatttgggaacccgtgatcagaagcggagagagattggcgcgggcggtgtaaatggccgccgtgtaaccagcgcagccggcaccgatgataatgacttgttcgctcataatagtatatatgtccgttgccatggtaaagggcccgtgcccgttttgcgagtagattttgcgctatgcggagacaatgcagcggcctgcaatccggcagttgcgggacgggttccggcagtggcggaaaagaacgcctgcctgcatgtatccctggcgacggtctgcaatattctggccctgtctgcgggaagattgcttagccgcgtccctttcaagggcaagcggcccggcaggcccagcggagattttccgaataacgtgaagtagattacgcatgccgtcaggtagctcccttcctccgtcgggtgccggccgtcaggctggtacagctgaatgcctggatggcgtttgaggcaattctcccaggcaatgcccacgggggcaagcgctgctttttccctccgggcaagtttcaaatacgtttcaagaagagccttttgctcctgcgggtccggagttccggaagcccctcttttcccccacgtcagcatcaggatgggcgttcctttggcggctcgtaccagagagcaccatttttctccgaactccatggttcgttccggagcccggacaggtgtagcgctttggtcctggagaataacgaagtcccatgccgttccttccatgttgttgcgggcacgcctgtcattccaatgggactggagggatgctgccggagccgcgtgcatgtgcacgtccggccgcaatcctttggtgtctgccatggctttaaccatggcgggcatgcggttgaaaaacgtatagctgtttcccagaaagagaatacggctgccggagcgtgcaggaacacagcacggccaggagggggatgcgggcggctcttcccgggcctggagagggcgggggaaagctgcccaggaaaaaatcagcagcaggaatatcttgacgggcggcatcatggctttagacgggtttccatgtttccggaataaaatttcaaatggaattcatggcgtgagcaggatctttctatacatcaggtaaaagtaaattcatagagataaaagagaacatggaatgcctctgtttcggcatcccttgtacaggcgccggggctgccgtcaatcccggcaggcagacggggatttccttgtctccgtatcgccgcgcgaaggtatttttcttccttctccttgattgggaagctctgcatcaatttaagtctgaacaactggttgtatgactggggaagactttccggaggacttgccgaaaggagacgggtgtggttggatatggtccatgaagtctgagtcgctgaccaagcgccgtgtggcgggggtggatgatccgctgtttctggattctctggatatttaccggacaagctttccggtgcatgaacagcggcggatacaggatttcccgttggcgtttcaagaccccggtttttgttatgaagtatttttaaatggggaaggccgggtggttgcgatgctggtgacgtggcgtcgggaaaaattcgtgtatctggagtattttgccgtggatgcctccctgcgcggccagggcgccgggcaaaggattctggaagaattgagagatgcgtttccgcacaaggttattttggaaattgatcctccggaggacgggatctcacgtcggcggctggggttttatcagaggtatggctttgtccccaatccgcagtttgattatatccatcctccttatacggatgagggtgaacctttcccgctcctgctgatgacgcatggagatttgctggatgaggagacataccggagctttgtggatttccaccatcgccacgtagtggcgaggtgaatgaatggccggggaaaacccgcgccatgggggattttctcctcttgaagcaaattatccttggggagctttgccgatatgagcctgtaggacatcaggctcatgttgcgttttgcctgtttgtggaacgcccctgagtctgtattttccgaatcagaagagccgttccgcatttttgggagacggctttttgaaaaatgcagcgggttgggatacaccggaagactcagctccatgcccggtccacggcttccctctcttccggggcaagatatctggagagccgttctcccatgcgcagcctgtattcgggaatactccaggaatggagcggctggacggcggaattggtgaattgccaggaggggacgggaacgaccacgtccagcacttctccggctctggagggcattccggccagtaccgccgcaatggtggaggaaagttccggatgttcatccagaatatccagcagccatccgcagcccaggtccgtgggaatggcctccgtttcggccagcaggtccgcgaggcgcccgggagggagatttttggaaatgaaagacagataaggggcaaaccgcatgtctcccaggctcatcagggcgtccagcgccggagtcatggatgcctgtccggggcagggagaggcgcagatgacattcgccaatccggcaattccgggaaaccgctcctccggctggggcgcggccagcgtataaataaggaaagcggattgcctgcggatatccggcgcctcatccgccatggcaaaaggcagcagggccctccatccgtcccctttgcgctgccggataaaagctgccagttgcagagcgcatttgcggcgggcgtccggagcgcagcgggattggaacatgttgtaaatgatgacgccttcttcttctcttcccgtttcattgcaggtgaccagcccgtaggcgatcatggccagaggccattgatccgaaccgatctcccccctgcgggagggatccgtgacgagggcggcaagccgcttgatttccgacaaagagctggtttgatcctgaaaaaggcccatgcccgcatgatagccggaggcggaaacctgccaaggaaaaaccgtggactgcttacaggactccggagttttccggtgaacgctgttgaggcatgttattgagtacgaccggcgttttatcctttatttattggcattccggctcgcggctggacaggaattccgtattttttgctgaagctttttcctgtgttcctctccgcttttcccctggtagaggtaggcggtgttggagttgtatccagccgttcggtcgatgaggtcgagaacctcgccgtctccgtatcccgccttcctgatgtatttgacgacttccccggcctggtcggggaagtacttcaccagcatggagatgaatcttttctccataattctgataacataagtgtcaagcatctgattccttgatgaaaatataaccaggttattccatttgtgagtccattcgtaatctttgatgtcatttccaatatccttggctgaagcgtccatttcagattgatgttttatgggagaaaagatttcatgatatagtgattcctcattcttgtgaaaatccttgatatgcatttttttaataatgcctgaaagaagggatatattaaaatgtatcaattttcttttactgatctttaatgttgttgacagttgatttatatccataagggaaatcgctgtgctgatccttgctttgctgtaaatatcattatttttctcgtttttataaggccatggttgagcactggtgtaatccggagcttcatacatgggggccccgcctatcagataaaggctccaaatcatgtcgcaggcttcttcccgtgtcatcacgccgtcatgctgcagtttgttgattgcggtcagaaccgttttagcgtgctgataaaatgctttcaggtcattttgttccagcaggcttttcaggagcggagcatgcccttctgtacttctccggatatggatggaatcgggcggcatgagttcatgatcgaatgaatgttcctccgcggaggaaaaattacatccaaagagaatgatgggaattatataaagaatatgtttcatggttgtttattctggtttaaaagaatgcttgttgttttcttctgttgacctgctgacggagcatccaaatttggaaatcgtcgttatagcttcttccagaaaaagaacccagtcataagaaaaaaattgattttctgtttgaatagtcgcgacatcctttccttcgacaaacatgttccaattacatttccagctccacttttgcggccatttaacatatcgttttaacacggctacggatctttgcgttccaatccggtcaaacattctgttttttctgtcgagttctgcaggttcgggattgggagtatgaactgttaccaggttgtcttcagcaggggctgggagacatcctccgtccctctctatgatttgaatgttttgaaaacttacatccgtagggagaaaggtcagttccaggtaagcagaggctcccgccatattttgttccccgtcttccggcattccttctataatcatccctcttttattaaaatccggattattcctgtcatcggatttacgacggtgctttgcgcttattctttcgggaataacggccgataattcgatttttgcttctcttccttcttctgttgttgctttaatagtaattggaccaccagcggagatatcttttctaataatcaatgtcgctgtttcagatttatctctgtcttcgaaaaatgccagattttctccttcttcgattgtccattcgatctgggatgggtctccaataagctggggcttatctgaaaccaatattactgtttcacctatgcccaatttctttcttttttgatcgttctctttatctttttcaggtacggagcctttttcttcttcttgaatataaatttgggcagagtactctgccgcctgcgattcgatgcgcaatacctcatttgccagtaaaggcgctgtgaagcagaggcccagcagcatcatggcgagatggcgttttgccggcattcccggggataagacgtatttttggaagaatggggcggatgcccggatgatggcgttcgcgttcatgttaaaattctctgtgctggttaccggttctgccgcaggggcgagactttattgccgctgattttgttgatcaatatttccccttgatgctttaattttttgtcattccatatttccagcagacggcggtaggttgccacatagtatgtgcgggtctgttctcttttttccaatgccgtgatggcgccttccatcatgccggcggagtatcttttcattttaggcgtccatgaggcattgttccctttcctggcccagacggaaagatgcttcccgatgaatccctccctgtatttgattatcttgccgatttcagggcaatccgccacgagtttgttccagcacagcctcgtgaagagttcctctgccgcgggagagcagtcggagtccaggaaacaggcgtacagttcatagggattgaccttgctttcccggattttgagtatgtttaccgctgcatgatggaggaggttgtgttcatggggcatggcctgcgccagttctttaagcagggtgagtttttgccggtcattgattcctttggccttcatgctcaggtaacgacgccatgccggataattaaatgggttcatcttgcaggcttctttcagcaacaattcccgttggacgggacgcggagagcagtcagataaaaccgtcatcaggaaggattcttccgccagaccgtgatgaataaaggcattgtaagccgggatgagctggacggggccgttccagggtatctggctttttcccgttgaccagttccatccgctgatattgttgccgattttccagtgtccgccggggtgtttccagataaaggcacagtgtcccggctgcccgatggcccacgcggggacgcctttggctctcagaaagcctgccgctcctttggagacggcgccgcacacgcctccgtattccgtataaagctttaatgtgaccggtttgtggtcgtaaaaagcggctccggcatgaacgctgactccttggaggtttttcctgcgataggggatgaaacccatgaatttatttccagcctgttcgggagggatctgttttttctctatgaactgctgggcccaggacaggtcttccaggctctctctgccacggaaaacgatggcccattcccacggctgcatcgtgtccgcctggggatggcatgcggattggaagtaggattcccggtaaaaattgaatttggacaggcattcttcaggagggatgacatttgaggcaagccctgcccccagagccatgctggtttcaacggggcggagcgttttattgttcgcgttccaaatgcggtaaaatatggatagggtttgtttgccggctgccccggatagggcaagcattctgaagacttccgggtgggtggagagccatttcctgaatgactcgtccttgagttcatgctgcgtgaacggttctccgttttccgcggtgctgaaaaattggtacaggtggcataacagcgcgacttgcggggcgtgcgccatggcccggattttatccgtgtcaaggtttgcggttcccagtttcctgcacagaatatcccgggcttttccggagatgaacgaggaacgttcggctgaaagtagtgtctggatatccggttcctgcgctgacgcctggataacgggaaaggctgccagggggagcgctcctaaaaggaggattcggaagatattatgcatgggagatgggcggaattgtatccatacctaatataatccatcatatggcaaaaagatgatgaattgtcaacggaaatgtttttgttttctgggaaaatgattgaacgaagagtcaatggaaatagaaacccagtgaatgaaaaggcgccgcgaaaccatgtccgcccgttgaatggaggcgtcaagggcggatcaggttttccatattgctttggaccaggtcaaccaggttgttgacggtcatgcccagttcctgcgccgcgcgtcggtaaagttccggaagggtttccggatgcccgtccgattccagcgccagccgatggagcggtatggaggcaaggagtcccggacgttccatttcccgcagccctacggaaagaagccagtttcccgaaggaaattccgtgccgggatgcaatgtccccgtccagccgtgcaggacaatgttcaaacggggatattttttcagcatttccgccagcgtgccccatgcgcggcagcagtgcagggaagcggggcggtccagacgcacggccagttccagatgccgttccagcgcttccttctggagaggcagccccgggatgccgcgccggcatttgtccagccccgtttccccaacgcccgcatgggggattttttgcagaagggattccagtctgggcatttcctctttccattcagccgggttcaggaaccagggatgaatgccgaaaaagggggtaacatgttcatcccgttccgccagaagggccacctgtttccagtccgccggggaggtgccgcagatgaaccgcggcgccgtgccggaagcggctgtagaggaatgggtgtgggcgtccggcagattcatcgttgcttaatgggacagagatggcgcgtccgacggttcaataatatcaaaactctgctttgccaggcgcacggcggcggcgcccgtttccatttcatcatggatgacgttggcgatgcccgcgtgatgcagggaagccacttccgaacggaatttggcgcgggcgatcaccgtgatgtccgcattggcgcccttgatctgcatgtaggtggacagggccggggaagggtccgggaatgtaaaggcaatcagccgcgcggtacggacgcccgccaggtccatggtgatttggtgctggatgtctcccagaaaggccagatggccgccgttgagcagggatttgacggtgtccgcattcaggtcgataatgatgcaggggatgccgtactgggacaggctttcatgaagcctcctgcctacggggccgtagccgcaaatgatggcatggtccctgatgccttccatgcgtgtgatcagggtttccacgttgaggcgttcccgttttgttttcaacccgggaatgcgcaccagcagcggggtgagtttccgtgccgccttcatcagcagcggagtcatgcccatggagacggcggcaatggcgtaaacgttggtggtcaccagcgccgggatgggggatatttcctgcatgaaagggatgagcaccagggaaaattcccccacattggtgagtgcggtggaggccatgatgcccatgcgcccgggaattttcaggaagcttgcggctgtaaggcaggctacgaatttgatcgcgaggacaaaggaggcgaaggtcgccacctggccgatgtgttcccatagtccatcaatgtcaatcaacagcccggcggaaacgaagaagatggtcaggaaaaggtccttgaaggggagcacttcgctaagaacccggtggctgtagtaggagctgctgacgaagaggccggcggtgaaagcgcccagggcgatgctcaggcccagcagactggcgagcatggcaattcccgagcagatggcgaacaccatcagggtgaagagttcccggcttttggtccgggcgacggccagcatgatgcgcggaagcaggtagcggccgatcagccaggcggctcccagaaagacaagcccccgcagtacggccatgccgatgttgagcgctgtttcccatgagtcgggcgtggcggtgaagatctgcggcatgattgccaccagcatgatggcggcgatgtcctggaacagggcaattcccaccgccatttttgccccggaggttccgctcaggccgaattcctggaaggatttcagcgccaccgccgtggaggatagtcccataatggccccgaccgtcagggagtggctcatgtccatgcctgtggcgtaatgaagccccaggccgaaagctgcggtacagatgaacatctgaatgcctccgccgaccagagcggttttccgcaggtgcttgagttcatcgacggaaaattcaagccccagcgtgaacatgagcaggataattcctacctcggaaagagcctggatgctgacgtcggaattggggatgtggtccagaatgccgcagttggccagaattaccccgcagatgaagtagcccgccagcagggactgccggaagtgggccagaatgagggcaatcgcgatgatgcccatgaagacgacagtaagcagaatgaagaatggaggcgcgtcattagggcctccggaggccagcagagagagaaccatggcggtcaggtcgggaagttagggaatggtaatgaggttgatttccggcgggcagttgaagcggcccggccctatatagcctatgccgcgggtgacgaatacctgcttgtcctcataaggatggaacccggagtgcatggtttccccttccgacgccaatagcggggtggaaaagaaaggcagtttgatttggcctccatgcgtatggccggagagcatcaggtcccagcggtaatttcccagcaattcccttcctttggggttgtggctcaggacgatggttggcatgggcgagttttcctccaattcgcgcgggctcatgcaccggtccgggaaaaagtccccctcccgcaggtctcccagccccaccagtttgaattccacgtttcccagcctggggatggagacgaaggcggcggaattcctgagcagcgtgaagcccccttccttcaggacgcgttccacattgtccgcaagggccatgtcatggttgcccagacatgcgtaggccggggcgacggaggagaggcgtttcatctgggcgatgtagtcgcctgcatgagtgacccgcagaaaatccgtgtacagatctcccagaaacacgatcatgtccggtctggcctgttccgccattgttgccgctttttccagcaggggcagattggtgtggatatccgacaataccaggatacgaaggccggaaaggccgggtacacatccggcaggggccgtgttttcattaaattccagatgattggcttcccagtgcatataggaggccagcagggaccccagcagaatgacagccgcggccgcatacaggagcttgcggagctgggaacgctttttggagaaagggtgggtggtcatgatagggaggggttgagaatggccagttccggcagggtgaataatccgttgcggcgcaccagcttaccgtccaggtaaatatctccgcccccggccgctttcgtctggatgcataccatgtcccagtggatgcgggactggttgccgttgtccgccacgtggtaggcctgccccggcgtcaagtggaaagagccggaaattttttcgtcaaacaggatgttgcgcatggggcgtgtgatggccggattgacgccgaaggcgaattcccccagcctccgcgcgccggggtctgtgtcaagaatggcgttgagctcccctgttttatctcccgcttccgcatgcacgaccagtccgtttttcagcgtcaggcggatgttgtcaaaggggatgccctggaacaggctgggcgtattgaaggaaatgtggccgttggcgctgtcgatgacgggggtggtgaacacttctccgtcgggcagattgcattcccccgcgcacgggatggcaggcagccccttgatggaaaaggaaatgtccgttcccggtccggtaattttcacatattcagccttttccatcatggcggccagcttccgcatggcgggacgcagggcggcgtaatccatcaggcaggtgcggaaatagaaatcctcaaactcttccgtgctcatggatgcctgctgggccattcccccggacggccagcgcagcccgcaccagcgcgtatggcggatgcgccgctgggagacggggttcagggctttcatggcggcggccatattttcctgtggaacggaggacagttcaaaggcgttccccccgccgcgtatctcaatgtaggcgtccatgtcctccatttccgccaggcggtggcggccgatgatgccgtattgttcttccgttgctcctgagagcatttcccggttcaggagggattggttcaggcgcagaaagggcattgctcccgcattcctcgcctcccggatgagggctattcccatttcctccggaatatccgtcagttccagcagaaccctgtctccggggcgcagggctgtggaataccctgcaagctgggctgcaagggcctgaaaacgggggtctctcatgtctttattaggcaaatacggcagcctttttgtcaagccggagacttgccacgggcaaaaaactgtggttttatcccccggatgtccagattgcccaagttaggaatactcggttccggttccggttccaattgccagtccatttatgatgccatccagtccggttctctccgggcggaaatcgccgtggtgatgtctgacaatccggacgcctacattctggaacgcgcccgttcctggggcattccggcggaggttattgactgcgggggatttaaaaccagatttccggaggaatcccaggcatccgttgccgcgcgcctgaagcaatacggcgtggactgcgtgtgcctggcgggattcatgcgcctggtgaaacttccgctgctgaaggaatttccttcccgcatcctgaatatccacccttcccttcttcctgccttcccggggcttcatgcctgggagcaggctgtgaacgccggagctgcggagagcggctgcaccgtccattatgtggatgacggaatggataccggccccatcctgggccaggctcgcgtgcccgtgctgccgggggatacgccggaaagccttcacgcccgcattcaggagcaggagcataccctttatcccgccatgatcgcccgcgttctggaaacgctggcatgacctgattctccttctggccggaaagcaatccggcctcctgccgggagaggatgacaggatgaccgattctcttgtcttgtgatatgaacggaatccgttaaaaaggagtcctcttttcaaagaaaggataaaaataccatgaagatgaacccttccatcgccctgtttgccgcttccgctcttctggcgggtgtggcaggcgcgcaagaaaaggctgccgaagctccggcggccgaccaacccaaacaagagaaagaaattactgtgtctcccgaacagatgaaaaaggacctgggctattttctgggtttccagagcggtcagcagcttggttccattcctaccctgacctttgacgacctggaccaggaatctttcctccagggcatcaaggacggcatggtccgcaagcccgccaaggaccaggaacagctgaaacctgccctggatgcgttccagaagcaaattgacgaacgcatttccgccaaggccaaggccaatttggaggccagcaagaaattcatggaggaaaacggcaaaaaagaaggcgtcaccacaacgaagtccggcctccagtacaaggttgtgaacaagggcggcgaagaaaaatttgatgaaaagaagttcaagaaccccatgttcaaggtgaaatacaagggcacgctgctggacggcaccgtgtttgacgacaccaagggcaagtctgtggaacttcctctccaggtcatccccggttttgccgaagcgctgaccacgatgcccgtcggctccaaatggattgtctacattccttccgagctggcttacggggaaaacactcccggcgctccgattgaacccaattccccgctcatctttgatttggaactggacggcatttcggaagctcctgctccccagggaggccccatgagcatttctccggaacagcttcaggagatgcttaagcagagcggcgctcagcagcagtaaggaaaaaatagttcaagtcagggccgttcccgggagggagcggcctttttgtttttatctgtaccgctttcatcaggaaagcgaatgggcagactgggaatttataatcctgcttctttccttaatccatgtatattgcttgtaatgaaagaatgatgattttgttcttctggatatggaggtagatatgctggacaggcggatgatatttgtttcccattatttgtttaatgtgagcttttttcgaaaattggcttgccaacggattataaatccgggtattactggccacaatatctttgatcagtatgagacttcatcttcctccgtctttgcgttccgcccttctcgcttccctggtttccttctccggcatttactcttattcccatgccgcaacctcggcggatttctggcagattcccgattttggcggtcctgattttacatggacgggggatggggaaggcgacgccgtagggacggcagacaactgggagggagacgcggctccctcccgcgtggacaataagggtccgcatttgatttttaatggcgtggatgtgacggttacgggaacgcctcccaatacctcggacggaggcggtgtttccgttacagggaacggcatcgtatccgtggggctgggacaatggggcggcaatgtgtacgtggagaagggctcctcccttaccacatccttcagcaaccagatcaaaaatacggaagcggaaggccatgccaatatttatgtggacggcattctgaacatgacgactccgggagggaatctcaattttgacaatggcactggttccggcaatcattactggcatatcgggtttgacggaatggtcaacctgtcaaacaccaccacaattaccaagaacgccaaaacatggaatgtggaggtagtggttgccagcgccatggaagagcttgcggtcaccaatcgcgagatggttgacgacgccctgatcacacgctatttcatgtctacaggggccgatttgggggcatccctggattccctgcgtatttggaagcaaaccggggatgatacttatgaggcattgacgagggttgattccgccggccagctgggagcgggtaatttcctgcttgtttccaacggttccggcatgtccgtgcagtacaagggggaagggtatgatgcagaaactctggtgtggaattccaacggaacatggagcaatacgggaacgggctggtacaagcagggtgacggaaccaagacggatacttccttcctgaatggggatgccgtcattttcacggcggcggaaggctccaaaacagtcaatttttccggaggaatcaatgtctcctccatgacatttgagacggattatacgctcctgcccggggaaggagctactctttttgcccaggaaacggttttaagcaacggctcgtccctgacgttgggtgacggggatcaccgtttttccggttttgaaagcctggtgacgggtggggaaaattcttccctcacggtttacatgaaaacggatgcttcttctgcgggaagcgtcaatttgctggagggttcggcccttcagaatctttacgtttatggagctttgagactgagggcttcttcccagtcgggatcatggatgcttggcggagccagcctgcatatgatggcgggttctaccatggtgttcggttccgatgcggggacatccatcggagcggggcaaacggtaatagcggagggcagcttgaatgtctatgcgcagaatgtttccgacagcaacacgtatctctggaacctggagggcggcgagaatgtctcgactggagatacgctgacctttaacgggaccagcaatccgaccgtggcagggaatatcacatacgccgggaatatcgtatctggcgcccagaccggttccacggtgacgtttacgggaaatatccaggcggaatcgttcaaggtagcccattattacggcagggttcatatggccgataatgaattggaagtcaataagctgtgggtcggggccggcggtgggtatgacaattccttatatggggctcttgatcttgattccggcaatgtgactacggcaggccaggtccggcttgccgagctggggcatggggtgcttaatgtgaaccagggttcctctctgactgtcaccggcagcaatgatacccatagcacaagcgccagtttcctgctggctcactgggcttattcaggggaacttaatttgaggggcggttctttgactgcattgcagacctcgatgcatctgtcctgggatggcacgggcattttcaatgccgcgtccgggacggccgatttgcagggaatggacttttgggcttccggaagcggttcattccggggcagtttcctgttgggcggcgcaacatccggggatgccagggtgaacataggctcttcaggcgttaccaatgtggcgggagcggccgttatcaaactgggagaaggcacgctgggggctttgtccaactggggtataagctataatccgaatttcacggcctcttatatagaacttctgggcacggtgaatgggactatccttgacacgctggatgccaatgaccatgccacggggcgtactgtgactttctccaacgggctgaagggagacggtaagctcgtgaaggttggcgacggggttctggttcttaacggaacagcccaggccccggttcctgccgaaggagaaacggcagccgtccccggctttaccggaacagtggaattgaggggaggcggtttgacggtgaaggattccagcgttatcgggcagggggccttgctgataggaggcggccttaccgtgaacgttacgtccgcggacgggtatgtgctgaatgccggttccacgctgggatccacgggaatttccggaggaacggctactttatccgccgggttgacgttaaacggcggcactctgagcttcaattctctcgattcggagacggcagccctgaccgtcaactccattagtggcagtgaggccacggaagtgcggttgggtttgtcttccctggaaacagggattagttatgccttgctttccggagcggggttgacggaaagttctttctttactttgggcggagctgctgcggagttgtacaacggaacgttttccgtcagcaatggaactctttacgtcaatttgagcgacaaggaaggtttgttgaggtggaagagcggcacctggaatacggaaagctcgaatacctcctggagccttgacggaacaccgtcagcttatgccgatggagagaccgtatatttctccaatggcgatggcgtggataaaaatgtgacgattgcggggaatgtcgctccaggcagaatcaatgtttccggtacggatttcatttttacgggtgacggttccattaccggggatacgacgctgaacctgctggacggagcttccctgaccatgaacaatgccaattcctatgccggggataccgttcttggcgatggcagcaaactcgttgtcggcaatgccggagcgctgggcaccagcacggttctgttgcagggagattccgttctggaactgaccacgggtacgtggaacgggttgggaacacgtttggacgccaattcctcaggcacgctgaaattgagcgggaacgcctccggaacgacaacggccgccctgactggagtcagatatgagctgggagccaataccacgctgactctttccgccggaacctatggaaatacgattaccggggccggcacgctgatctccgcggtaggaacgaatgtccttaatggaaatgttgatattacaggagaatacagggtgttggcaaccaatggcacggcatgcgcctggacgctgggttccggcgcttccgtgacggcgggaagcttcatcggccgctacgagtacaatggaacaaccacgctcaacatcagccgggacgccgtgatgaacattaccggcacgctgcggattgcccgtgacggaaaaggcgtcatgaatattggttcgggcggcatggtgctggcccagacgctggatttggggcagaactgggatggagtaagcgccaagggcgccaccattaatctgaatggaggttccctgcttcttggttcaggcggcatgacggcatccggaaataccaatacgattgccctgaacatgaactccggtacgctggggacgacggcggcggaaggctggtcttccgcctacaatatgtcccttactggaaatgtgacggttgatacccgccagtatgatgcggaaaccaagtcctaccatgacctggcttccaccggcatcaccctaggaggcgccctttccggagcgggcggtctgacgaaaaccggttcaggcaccttgactctttccgggcagaatacttatacgggcctgactaatgtccaggccggaacgctggcgtttacgaatacgaatgccatggctctgggcagcatttccatgggtgcgggcgccagaatgacgacggcttccgctctgacgctgaatagcggcgctaccctcacttttgacatgacgggcgtggtggcgaatgagcctgtcatcaatatcacggccgggtccctggctcttacggattcatcctgtgcgctgactatcaataattatggtgaattggaggcatctaactatgtcctggcccagtgggctgcggatggaagcctgacgacggattccttcacatggacgcccgacatcaccagggaagggttcgaatattccgtggtggtggaaaacaaccagcttgtgctgaaggttgttgacgtcagcggggacaatggttttgtctggaacggaggaacggaccggaagtggatcaacaccagtgttgacggctggacgacgaggctgacgggggcggatacgctggataatcaggaaatttacttctcctccgcggaagcgggtgaagtcaaggtttccggcattgtaactcccaagagcgtcgttttcaacagcggcgcttacacgttgggcagcgatcctgacagcgaggggtctattgcggattccacagctcccaccacgcttaccgtgaacggtacggctgaagttgccttaaacctggccaatacctataccggagggacgatactcaatggcggtacccttaccattggcgctgacggagcgctgggaacggaaggggatattatattcaacggggggacgttggcctatgcgaattccgccgccggtgaggatgcgacaggttatgacatttccagccgtgtcaacgtcggagacggaggtttcctgaatgtttccgtgcttggcgccggggataccgtttcctgggccggcctgtcagccgatgtcatgggggccggcacaaccctgaccaaaacgggagcgggcacgctggcccttggatacgcagggaataccctggcccacctcactgtggaagagggcacgcttgctttcacgggcggtgcgactatcggcgtaaatccgaacaatgctactattgtccgcgtcagtgaaggcgcttcccttgctctttccggcggaaccgtcaacctgcatgcccagctcaatggggcgggcaccgtcactatcgggactgcggatactgcgggactggtcaatatctccaatacgggcaataccaacttcactggccgcctggaactggtcggcaacggggtgaatatgagtaccaatgccaactgggtagcctttggggcaggaaatacgctgggaggcggcaccgttttcattgacggcaagggcttccatttttccgcgggtacgacggcggccaattttgaaatcggcgcaacccatggcgcgatgcagaacggctcctccggcgccacatacactttctccggaaacctttccggttcgggcacgtgggccatggctgcgaacgttcggatgaacaatgtcctcacggggtccctcaaggacttctcggggactctgtccaccaatgagacttccgccaacaacaatcgccaggcctggaacttcggttccggcggggcttgcgccacgggtgaagggaattccgtttttggagacggcgctattctgggaggtaacacgggttccgcggataccgggctggccgcacaatacaacgtcaattacaacaatacggaactggtgttgaatgctctggtgcagggcaactccagcctgacgcacgcaggtacgggcactctgattctggataaggccaatactgctacgggagcgctcggcattacaaatgccggagccgtagtccagcttggcgcggaagacaaggccggccagtgggccggcaccgtgctgaatggagcgggaacactgaaaatcgtcaatggtgcgctgacctccgccatgacgcgggcggaaggcgccacggcagccatcgtcgtggactcagccgcttctgtcagcttgggggggaccgacggcggcatgctcaagggcattacgctggctgccggaggcaggcttgtcaacgtttccggagatattacggtgggggcgggagccacggaaacattgaatcttaccctgggggcggataacgtcaaccaggatgcggccggggcggccatcattgaccagggagacggcaggcttgtcattaacaatcccgccacagtcaatctggatattgactccattgtgaatacgcttgtcgcccataaggaggccggcgcggaaagctggctcaccctgacgaccggaacgctggaatgcgaaaatcttggcgatatccagttcagcaagattctttccaactacggcatccgggtgacgggcatcaacggcggaagcctggttctcagcgggcaggtcagcgggctttatatggtggatgattcctcctcttccgaccctgataccgtcaccaactacggcacgctggggatgtactccggcgtggtgatttcccaggacaagacgcttaccgttcagttgtccggcgctcccggcgattctgacgggaacggcgctgtcatcaacaacctgctgggcgctacgggaagcacgctgaaagtggaaaacaccagtgcggacggaggcaacgccgttgtcatcctcaacaacgaacgtctggaaacgggattgcctgctcctgatgattacgccggtgcggattccatcatgggcggaagcatcgtcggggaaaacggagtcacctttgtcaagcaaaacacgggcaagctgacagtcaacggttcttttgtgtcggacaccctgcgtgtggaaggcggttctctcgctcttaacggtgaagggaacagctttaatcatgtggaacttgccggcgcagaggaaggaggcgttctggacatcaaccggaataccgtcatgggtgatctgacggacagcggcgaaggcgcagccctgaacatcggtagcggggcctccctttccgtcaacggcgccagcagcctttcttccagcaccatccagggcagcggaacgctgaccctccgtgatacgctggaaatttccggaacagcctcccttcagggcggtgtccttcttgatctggcaaaagatgacgattccacgggaacgctcgacctcggttcgacatccggcagcaccgtttccggaattggcggagagggaacactgaagagcgcaggaggcgttttgaccgtcaataccggtaattcgggcggcggttccgttttcagcggtacgctggagggacgcgggcagcttaatatttccggcaatgccgggcagacgtttgaaaacgtcatgaccgctgccggcagcagctgggcagttaacagcacgggccttctcaatatccggatgggagggacggtagacagcccgagagccaatacggcgctgaccctcagcagtttgacgctgggagacggttccagtacgaaccttaccttcaacacggactacgctggccccatcatcagcgtgaccggaaatatcagcatcagccagggcgcggaaataactctcagttctactggcgggaatgaactgactctggacgcagacggcagttatacgctcatgcatgcggacggcaccattgatttgggaggaagcgacaggctggctatcctgctggatccctcctcctccgctttcaagaaatttgaaaatgatgcgtacctggtgatggaaaacggcaaccttgttttgatggctacggcttccaaggacaataaatatgcccgccttgcggatacgtttaattccagggccggagcagaacttctctggaacctgcccggcgatcttgctgcggattccatcctcaagaaggtggatgacgccgtaggagccctgacgtcttccaacccctcggaagcgaaacgcaccatggcagcagtggctgggagcacggtcaacgcgctggggacggcacagagggacgccctgcgcgaccagatgggctggatcaggaaccggaccaccctcatgggcgtcaacccggcctacgtcaacgacgacctcccccgcttccacatgtggatggaaggcacgggctcctacgccaaactcgacacccgcggggatgaaagcggctaccagctcaccacctggggaggcacggtaggcgtggacgcggacctcagcgaccgcctcacggcgggagcggccttcacggccggctacggcgacctgacggccggcgcggcggacagcgccgacgggcacctggacagctactacgccagcctcttcggccgctaccaggacaggcgctgggcgcacacgctcatcctgacgggagggtggaacgacgcgaaactcaaccgtacggtcaactacggggaaggaagctacgggacgcagggaagcaccagcgggtggggccttggagcgatgtacgaactcacctgcgacatctacctcgacgaaaaccgcggcagcgtgctgcagccgctgttcaacgcctcggtggtgacgacgcggatggacggctatgaagaaacgggagcgggcaacgcgggcctgaacgtcggcaggcaggactggacgacggggacgctggcgctgggcggccggtggatgggtctggtgggcagcaacatcttcggacgagaagcgctggcggaaatccgggtcaacgcggcgcaggacctgggagaccggagaggggaaacgaacgtctctctgctgggcaacccaggctttgcgcaaagcgtgaggggagcgaaaacgggaacgacggcgctgcagctgggagccggactgagcgtgcctgtaggaacgaagggaaccatctacgtgaacgggaacgcggacatccgtgacgggtccagcgcgctgaacggaagcgtcggctaccgctacgacttctaacaagaaagaaaacacaaggagggggggccacccccgaaaggccttcctcctgaccctccagagccgctccggaacaactccggaacggctctgttgcctgaggaaaacccctgggggcgcccggatgggtcaaaaacaaaacagcggcaaggaaaaagaatacgccgtccccacggaagcaatggccctttttcccctcgtcccctcccgtgaaacgcctcatcctctcctcaaatctgtaaaaacgcgccaaatgtttccggaagccctctccgctgtccggagccggaaaagaacggaacgcgagcaatagggccttttttatgcgatttcagcggaattttgcaaggctaggccctacgcgcgcgcacgcggtttataacattagtcttgcaaaaaattaagataagcgtagtatatttcggttatgtccgaagataccaacgaggttgttgaaaccaccgtttccacgacggcgcagcatgagtacggcgccgcgcagattgacaaactggaaggcctggaggccgtgcggaagcggcccggcatgtacatcggggaccctgacgaacgaggcttgcaccattgcgtatttgaagtgctggacaactccattgacgagcatctggccggctattgcagcaagattgacattgtcattcatgtggacggttccatttccatcgtagataacgggcgcggcattccggtggatatccacccgaagttcggcattcccgccgtggagctggttctgaccaacctgcacgcgggcggcaaattcggtcagggtgcgtacaagtactccggcggcctgcacggtgtgggcgccaaatgcgtgaatgccctgtccgactggttcaaggcggaagtgcgccgggacggcaagcgctatcagatcaaatttgagcgaggcaagacggtggaacccctccgcactgtaggttcctgtgcctgtgaagtcacgggaaccacgatcacgtttttcccggacgccaccattttcacggataccacggagttcaagtttgaccgcctgacgacgcgtctgcgggaactggctttcctgaatcccggcctggtcattgaactgattgacgagcgtgaagctccggcgcgccgggaaacgttcttctataaggacggcattgtggagttcgttcgtcagctgggcacgaacaaggaagtgatcaacgaggaccccatttccatttccggcgtccggaaggtggaagtggagtacgacggcaagaaaatggaggatgatgttctggtggacgttgtgttccagtacaacaacacgtatgaaacgaacatcctttgctttgccaactccatttacaacggggatgggggaacgcacctttccgggttccgcggcgccctgacgcgcgtcatcaacggttacgcgaaggccaacggcctgctgaaggaaaaagatccctccctgagcggcgaagatgttcgtgaaggcctggtggcggtcatttccgtcaagatgcccaacccgcgtttctcctcccagacgaaggacaagctggtgaatacggagattgaaggcgtggtgggcaacgtcgtgtacgaggaaatcaagacgtactttgaagaaaacccggcgatggccaagaagatcattgagaagagcatcacggccgctcgtgcccgggaagccgcccgcaaggcgcgcgaaacagtccgcaagagcgccctctccatcggtggtctgcccggcaaactggcagactgttccgaccgggatcccgcgaagtgcgagctgttcattgtggaaggtgactccgcaggcggttccgccaagatggggcgcgaccgccgcacgcaggctatcctgcccctgcgcgggaaagtgctgaacgtggaaaaggcccgcctggacaaagccctgggaagcaaggaaatccagaacatgattacggccatcggcgccggaatcggggaaggggacgatgaagcctccttcaaactggaccgcgtgcgctaccacaaaatcatcatcatgactgatgctgacgtggacggcgcccacatccgcacccttcttctcactttcttctgccgccacatgccgcagctggtgcgcgccgggtatctgtacatcgcccaggcgcccctgtaccgcatcatccgcaggaaaaaggaagagtacgtgcaggatgacgtggccctgaaccgcaaactgattgaactggccgtcaatgacgtgaccctgcgtttcgcggacggttcccgttccttctctcccgaagagctctccgccattctggaaacgctggtcaacctccagcgttatacggaatccatgcaggcgcagggcggttccctggaagacctgctcagccaccgggaggccaacggggaattcccggaattcctggtgaaggtgcgctgcggcaatgaagaggaaatactcttcttccatgacatggaggccctgactgccttttccgaggaaaacagggaccttttcatcttcggcatgccctcggaagaggagctgctggaaaatccgcttccggaacgggaggggcccagccgccgttccatcacccatgaactgcatgaagccaaagccatcacgcgggccctggcccggctggcggaactgggcattccggggaatatgattgtctccatggacacgcccctgtttgaactggtggagggtgagggggacaaggaaaaagtaactcccctgttctccgtcatggacattctggaatccgtcatctccatcggcaagcgcggggtggaaattacgcgattcaaagggttgggtgaaatggatgccaaggatctgttcaagacgacgatggacccggaacggcgcgagctgctccgcgtcatcctgaacgacgacaacgccgtcagggccgatgaaatgttcaccatcctgatgggggatgtggtggaaccccgcaagaattacatcgtggaccatgccctcaatgtccgcaaccttgacatttaacccccgcactctctttcagcaccatggaaaataatagaatcaaaccggtggatgtagccagtgagctctccacttctttcctggactactccatgtccgtcatcatctcccgcgccctgccggacgtgagagacggcctcaagccttcccagcggcgcatcctgtacgccatgaaggaactcaatctgtctcccgggggcaagacccgcaaatgctccaaaatcgtgggcgacacgatgggtaattaccacccccacggggatgccgccatttacggcactctggtgaacatggcgcaggactggtccatgcgggatattctcgtgatcggccaaggcaacttcggcacgccggacggagacccccccgccgccgcccgatacacggaagccaagctttccggcatgggcgtggccctgatggcggatctggacaaggacaccgtggactttgttcccacatacgacaatgaacacacggaacctaccgtgttcccctccgctttcccgaacctgctggtgaacggcggcacggggattgccgtggggatggccaccaacatgcctccgcacaacctgggggaagtggtggacggcatttgcgccgtaattgacaatccccacatgacggtggatgagctgcgccagtacatcaaggggccggattttcccaccggaggcgacgtgctgggcttttcaggtattgacagctacttccgcaccgggcgcggctccgtgcgcatccgcggcaagatagacatggaagtaacggattccggcaaggaccttctcattatccgggaagtgccgttcggcgtgaaccgtgccgccctccaggaacgcatcgcggaactgtacaaggataaaattctgacggacatttccggcatccgggacctttccgacgagaaaacctgcattgaaatcgagctgaagcgggatgcccgcccgcaggtggtcatgaaccagctttacaagctcacctccatggaaacttcctttgcggtgaacatgctggcgattcatgacaaccgccccaagacgctcgccatgatggacgccatcaacttctacatcgagcaccgccgcgaggtggtcgtgcgccgcacgcgctacctgctgggggacgcggagaaggatgccgagcgcctggaagctttcctgctggccctgcaccacatggatgacttcatttccattatccgggattccaaaaaccgggatgaagcccgtgaacgcctgcagaactacaccttctccacgcagacggcggaaagcctgggcatcctgatccgttcccaggcctctatccagggggaccgctatgtcttcacggaacgccaggtgaactccatcctggacctgcgcctgtaccagctgaccgctttggaaaacgacaagatttccggggaatacgcggaactgctggtccgcatcaaggactacctggatattctggcgaacgaatcccgcgtgctgggcatcgtgaaggacgaactgaaggcgattaaggacaagtacgccacgccgcgcgtcacgcgcatcattcccttctccggggatatggccattgaggatcttatcccgaatgacacgatgatcgtcaccatcacgcacagcggctacatcaagcgcaccaactccgcggaataccgcgtgcaggcgcgcggaggcaagggcgtgaaggcagccactaccaggggggccaaaaaggacgcggaggcggactttatcgaacacctgttcgccgcccagaaccacgactacctgatgttctttacgaacaccgggcgcgtgtacgtggaccgcgtgtatgagattgacgaggcggcgcgcagcgcgcagggccgcaatatcaagaacctgctggatctccagccggaagaagccatcgcggccatcctgcgcctggaacgccgggtggatgaaaaaggcaatgacattacctttgcggaaggcagcggcaatgttgttttcgccacgaaggacggcacggtgaagaaaaccagcctgaacgatttcgccaactaccgcaaggccggcatcatcgccattaatctggaggaaggcaacagtctggtgaacgcggaacttaccagcggggccgatgaaatcgtgctcgtcacgcatgacggcatgagcatccgcttcccggaagaagatttgcgtacgcagggccgcaacaccatcggcgtccgcggcatccgcccgcgggcgggggactatgtggtggccctggctattgtggacccgcagaaaaccctgctggtggcttctgaaaacggcctcggcaagcgcacttcctttgacgaataccgcacgcagggccgcggcggcaccggcatcaagaccatgaactgcacggacaagaccggcaaggtggtttccgccacggtcgtgtccgacgaagacgagctgatgctgatgaccacggccggacaatccgtccgcatcaaggtggcgaccgtgcgtgaaacgggccgcgccacccagggcgtgaagctcatgacgctgaatgagggcgaatccatccaggacatttccatcgtcattcccgatgatgaggatgaagaagccccggcggaaacggaagacgcgggagccggggaagtgtccggtgaaatggaaactccggcggaagaataatattcaggttttcctgctccggcgtcatgccggagcagggggcttcatgggccgtttttatggaagaccccctttcattggagcaatgtgccggacgtctggaacggcgcggattccggagctttgtagtgccgggcctgaaggaggctgcggaggtgatgctcggcctggtgcgggagttcagtccgtcgtccgcttcctatggggattccatgaccttgaaggctgcgggcattcttgatgacctgcgctccaatccggacattcagttctatgacggctttgttccgggcatggagcgggaggaaaaatgggagatccgccgccggggcatgacggcggacctgtttttaaccggcgttaatgccgtcagcatggaagggaccctgcactgggtggacatggtgggcaaccgtgtggctccggtggcattcggaccccggcatgtcattctgctggccggttccaacaagctggtggccacgccggcagaggcccgggaacgcatccgccgcattgcgcccctgaacgccaggcggcatgaagggttcaggactccctgcatgcacaccggaatctgcgcggattgcaattccccggaccgcctgtgcaacatccacatgtcccttgttaaatgctttcccaaaggaagaatttccgtcattttgacggaagaacccggaggactttgactcatgccttttcaaaaccggatagaaatcatggccccggcggggtcgtttgaatccctggcggccgccttgcagggcggagcggactccgtgtacttcggagtaggaaagctgaacatgcgttcccgcgccacggtcaatttttcggaagaagatttgccggaaatcgtcgcgcgctgccatgaggcgggcgccaaagcctatctgacgctgaatatcatcgtgtacgatgaagagctggaagaggtgcatgccctgtgctccgctgcccggaaggctggtgtggatgccgtcatcgcttccgacctggcggtgatttcttatgcgcgttccattgggctggaagtccatatgtccgtgcaggccaacgtctgcaacatggcctccgtcaaattttacgcgcagtacgcggatgtggtggtgctggcccgggaactcaccttggcgcaaatcaggcatatcattgaatccatccggaaggagggcgtgaaaggcccctccggtgagctgctgcgggtggaaattttcgcccacggggcgttatgcgtggccgtgtccggcaaatgccacatgagcctggcggcctacaactcctccgccaaccggggggcctgtttccagaactgccgccgcgcctaccgcgtgacggacgaggaaacgggcaatgagctggtgatagacaataaatacgtgatgtctcccaaggacctgtgcaccattccggtgctggaccagcttctggacgcgggcgtctccgtactgaagctggaagggcgcggccgttcctcggattacgtcaggacggtcacctccgtgtaccgggaagccgcgcgggcgtgccaggacggaaccttttcctcggacagggcggaagcgtggatgaaacggctggaatccgttttcaaccggggattctggcagggcgggtattacctgggtgtgaagtggggggaatggagcggttccgccaacagccgcgcagccctgttgaagatccacattgccagagtagaaaacttttataagaagaacggggtggctgctctgttcctggaagccggcagcttgtccgtggggcaaaccatccttatagcaggccccactacgggagccgtccgcatggaagtggccgccatgcgaagggagtcggcagagggaatggaatccgtagaagccgctcaaaagggagaaaccgtctatctggcggttcccgaacaggtgcgccgccgggacaaggtatatctgctgcgcccccggatgctggaggatgcctgaatgcccggctgacccttttctcttctgcctgccttttccaaaaaccgggaattgacgggcagaatgattttaatttttccgtttcctgcccggctgggccggctgggcgttcggtttcagccggggcctcttgaaattcacggcggatttccggtttggaagtccggcttaattaagctatccgttcattatctttcgtttgggataaaaatgttggaaagtgattttccaattgaatgaaaaagaatttctctggcgtattatttgaaaaccatacgccatgcctgcctatatttcctttctgcgccttttttcatgttcctgcgccttgctgggagcaggaatgctccatgcttccggtttgcagccctggctgcgggagctggccgtaattccgcctgcgtcttccgtgaaagagaaggatgcatggatgcggcaggtgtggacaaggacggcggagtatgcggcttccctttccgagccggctgccgccgacgattgcggggatgcgatggttctgctggttcccgtatttcaggcatggccggacgggaaggctgccggctccacgctggcggaaattctttccgttccggcagagagtattggagccgtttcttcctgggatgacctggttaagcatcaggaagctattcagaaacgagtccgtttcctcaggctgaagaagctggcggcctattacgattctgcggccatccgccgtgcggtgaagcgaaaccgggacaagtacggggaacggtacgccggagcggaaggtttcctggcgcggctggatgagtgggagaaggagctagggcctctggaccggtgggtggagcaggcagggtcgggacaggcggcccggctgcgggagatggtggatctgcggagaaaagccctgattgaagccctgccggaacagaacggcctgaaggcatgggtgagcgtacggcgtttcaatccgtccgggaaaagttctttcaatcatgaccgtccggcgaactggcagggtatttccagcatgccggagtccgggcgcagataccgcagcgtcattgtgaaatttaacggggtttcctcttcttcccctgtggagcagctgctggcggacgaccgctgggttgggcatctggatattgatttttccggggagaagctcatgttcaccgggaatggattcggcaagaaggaaaacaggccctgggacgtttttgagctggatttgaaaaccgggaaaaaggaatcccttactgcgcatatgccggcggatacggacagctataattcctgctaccttccggacggccggattattttcgtcaatacttccggcatgcagggggtgccctgcgtggccggggtggattacgtgggcaacctccacctttacgaccgggaaaagaaaacgacccgccggcttacctttgaccaggacaataactggttccctaccatgctgccggacggcagggtgatgttcctgcgctgggagtacacggaaagcgcccactatttcagccgcgtgctgatgcacatgaatccggacggcagcgaccagaaggaatactatggttccaactcctactggcccaacagcttgttcaacgcgcggcccctccccggcaggccaggcatgtttgcgggcattgtcagcgggcaccatggagtcaagaggctgggggaactggtgctttttgacgtgaacaggggacgcgccgccacggagggtgccgttcagaagattccggggtatggaaagcccgtggaaaacgtgaccaaagatcagctggtgcagggattgaagactccttatttcgcagaaccttatccattgaatgacgagtgtttcctggccgtttcctccccctccggcagccagggcgtgaccaatgtggtctggtgcgacatatacgataacatcgttcctctcacggcctcctcctacttcgtctatgcagaccccgcgcccctggggccgcgccaaaaaccgcccgtgctgcatgaccgggtgaagacggaaagcaagacggctacggtttatatttccgacgtgtaccggggccgcgccatggccggagtgcccaggggggaagccagggccctgcgcgtgttcatgtccgagtacagcccccgcaatacgggaagccactatgccatgggcatggagagcaattgggacttgaaagtgctgtacggcaccgtgcccgtgaatcctgacggttccgccatcttcacggctcccgcctgccagcctttgacgcttcaggtgctggacggggaggggcgtgccctagcgctgatgcggagctggtttaccgccatgccgggggaaacgctcagctgcatcggctgccatgaacggcagaactgcgctccccccgccagggccgtcatggcttcccgccagaaacccgcctctatcgtcccgtggtacggccccgcgcgtaccttctccttcatgaatgaagtgcagcccgtgctggaccgccattgcatacgctgccacacagcggaaggcaaggcccgtgaaggagtgccggatttcatgacattggaggccgtcaagggggcgcccgcccccggctccgtctcttattggaacctgcacccctatgtgcgccgcaacggaccggaggggaactatctggggctggcccccacggagtttttcgcggatacgtcggagctttaccagctccttaaaaaaggccaccatggcgtggacatgccgcaggaggactggaaccgcctggtcacgtggatggacatgaacgccccttatctgggcgaatggccgggagagcgcaatgaagggctgctgaaacgccgttatgacctgcacggcagattttcaagagcggaacgtaattacgtgacgatgaaggattccctgttccggagaagcggcggcggttccatccctgacgccgggaactccattacccgcgccggagaaaagagcgttcccgttccggaaccgcgaaatgaaacgctgactgtggatttgggggacggcgtgaacatgacgttccgccgcattcccgcagggaagttcaggatggggaatgaacgggaaacaccggcggaacgtcctgtttccacggtggggattgaaaggccgttctggatgggagaggcggaagtgacgctggaacaataccgccgcttcgacccggagtatgctaacggatggtatgacatgcattacaaggatcaggtgaagcccggctacgacatggatgccgatccgcgttttcccgtcatccgggtgccttgggcccgggccatggaattttgccgctggctttccgggaaaaccgggaaaaaagtgaccttgcctacggaagcgcagtgggaatacgcggccagggggggcgcggatacggatttcttcttcggggaacgggatgcggatttttccgcgtatgccaacctgggggacgtgacgctgaaggagctggccgtttccggcgtggatcccaagccaattaaaaatcccaaccgtttctgggacttcgtgccgagggatgaaacatacaatgacggaaagcttcacctggcccccgtcaagagttacaagccgaatgcctacggattgtacgacatgatcggcaatgccgcggaatggacccgttccgaatacaggccctatccctggaaggaaggggacggacgcaatgaaagcctggattcccgtgttccccgtgcggtgcgcggcggttcctggtatgaccgtcccagacgggccacatcctcctggcgctggggatatcccggctggcgtccggtgtacaacgtggggttccgggtgatcatagaagactgattgttgaaattgccatgaaactgacaaaaatgttccgcgtctctgcgactgttcttggctgtctgctggtcctcatttcatgcaggcagggggaggatgccgcttccagccctctggctccggtggatgtgaaggtcgttaatcacctggttgctgtgctggggcatgagagccgcgtgctggaactggtggaccctgcttccggggaaaaggtgaaaagcatccggctggcccagcctcccaacggcatggccgtggatggcgcgacggtttatgtggcggaagggggagcgcgcggagtggtggaagtagtggacctggaaagcggggaattgaagcgttcttttcctgccgggcatacgcccatgtctcctgtgctgcgggaagggaagctgtatgtggcctgccggtttgattcccgcgtgctggaaatggacaccgctgccggaaccgtgctgaattcctggaatgtcccccgtgaacccgtagtgctggccgtttctccggacggcaggaaaatctgggctgccggccatttgccggccggggctgcggacggggatttcacggctgccgcgctgactctggtggaagacggaaaagctgtccatttcctgctttccaacgggacgcagggcgtgcgcggcatggcgataagcccggatggacgttatctggccgtggcgcatgtattgagccggtaccaggcgcctaccacgcagctggaccgcggctggatgaatacgaatgccgtgacggttatcaatacggacgagccggacaagcctcatcccgttctgctggatgacccggatgcgggggcggccaacccgtggggcgtttctttttccggagatggcggaaaactgttcgtgacgcatgcggggacgcatgaactctccgtaattgatttcccggccctgctggagcgcatgaagcgggaagaccggagcaatgagccggtttccgaaaggcttggtttcctgcacggtctccgcgcccggatcgctctgcccttgaacggcccgcgctccgtggcctccgatgggaaaaacgtttatgtggccggctatttttctgattctctggcggaaatctccctgaaggatgcccgcaaatccagggcaattcccctgaatgccccattccggccttcccgggaaaaactgggggaacggtattttaatgacgcttcccattgcttccaggggtggcagagctgcgccacctgccacccggacggccgggtggacggcctgaactgggatctgctgaatgacggcatgggcaacccgaaaaatacgcgcaccatgttcctttcccaccggacgagcccggtgatgacgctgggcgtccgcgcctctgcggaagtggccgtaacggcgggttttgtgcacatccagtttctggaaccttccggtgaattggcggaatgcgtgaatgcgtacctgaaaaacatgaaggaagttcccagcccgttcctggtggcgcataccccttccaaacagcagacggagggggaggggtgcgctcagtgccatgctcccggcgtggaacggggcgccttgtccgaatctgcccggaggggcagggaagtgtttaaaacagccgggtgcgtgcggtgccacccccatccttacttcactaacaaggaactggtggccacggggacggccacggggctggatgaaggtaaaagcgttctggtgccttccctggtggaagtgtggcggaccgccccttacctgcacgacggccgtgcgaagacgatacgggaagccatcacgacatgcaatccgggggatctccgcgggaagacgagttccctgaataaccgtgaactggaggatttgatcaattatgtgcagtccctgtaaaggggcgggagggcatcatgacggcgaatgtacctgaacgactggaatggtccggaacaaacggagcggaagaatgcttcttctgcatgacggcggagccgggcgcgagttttgaggaagaactgcgttccctgatggccaggtaccgcaatctggggggaggggaagaagatgaattcctgctgcgtttccatgtcagcgacccggtgcgccagtcggctccgctgcggcggataacaggagaacggaattcttatgtttccatagttggacagccccctgcgaacggggcccgcgtggctctggaagcctggcacatcggcggaatgctgggaaaaaggcgtagggcggagcagggcggaacggtcgtggaagccctccgcgcgcattaccggctgtttctggcgggcaagggggaattctccgccccggacagctgcggccagatgcgagaggaattccgctggctggaccggattgccgccttacaggggggagccgtgccggatttggttcaccgcacctggatttattgccgggatattgataacaactaccggggattggtggaaggccgcaacggatgctttgaccgttacggactgactccggagagccatttcatcgccagtaccggcattgaaggctgtacggagctgccgggccgcctgctgcatatggacagtctgggcatcgtggggctggagcccgggcaggtccggtacatggaagcgccggactacctgtcccccacgcatgtgtaccgggtggcctttgagcgcggcgtccgcatcgtgtacggagaccgctcccattatttcctttccggcaccgccagtattgacgcggagggaaacattgtccatccgggggacgtggtgggccagacggcccgcaccctggaaaacatgagcgtcctgatggaaaggagcgggggctgcctgtccgacctgaagcaggccgtagtgtacctgcgcgactgggcggaccgggaaacggttcggaaccgactgatggactctccgttggccgcagtgccgcatgtgatgctgaaagcccctgtctgccgccccggctggctggtggaaatagacggaatagccgtcaatggagccggagaacctgcctttgccccattgtaaattctgccgttccatgaaccgcggcgcgcgggcgatttcccttgttatcctatgcacggaaatggtatcatgaaagcgcatgacctatcgccttaatacggaccgtctggtatttctttccgtgctgttgtgggtgttgttgccgccgggcgtttttgcctgggaaggtaatccgccgagtccggataatgtgcggtggctggagcagttctgttccagctacgtgcagtttctggccctgggcggcgtgttgtgcgcggtgatcggttttgtgtgcgccgtcctggtctggctggtgcaccgtctggactgggagcggagtttgaaaatcagcgtgctgtttgtcatgtccatcctgtgcctggttttgtatggcggctccctttcctttgccgtgttttatcttcccctggccctgattaaccccgccgtgtattgtttcagcgttagcaggatggaatgagagttcctggcggcgacggagggatgtttttcctggggggagaagaggctttataattttatttttggcgtatcttttttgattttcaaagatagcaggatttgccccggagccgtccgcggcaaaaacggctccgggtgtttatgcttttataaagattgcggatgtaatgcgcggatgctccagtcaccgaatccttccccctggttgcgttccgccgcaaaacgtgcaaatactggtcggagcacgtctgcgatttcctttacgggtacagattcctgatagatgaagcccagcctgtctcctcttctggaaccgcccatccagatattgtacttgcccggacctctgccgacgaaagccagttctgccagatatggtctggagcatccgttgggacacccggtcatgcggatggaaatgtcttcgtcccatagccccagttcttttaactgcggttccagttcatccaccagttttggaagcagcctttcggagtctgtaagggcctgcgggcaaaatggcaggctggtacaggcggaggaattgcgcctgagccccgaatcgttggggagaagattgtacttcccaatgatggatttgatttgctcggcagtatccggtgtgatgccgtcaatgaccagattctgattacctgtgatgaaaaaatctccttgatgaatggaagctatttcatgaaaagcggttttgagctgttgcctgtttgaattctggatgcggcctccttcaatttcaatggtctggcggccaggaacatctgcggcgtctccgttcgtagataatgaaaaaggtctggccgcttgaagcggaaatggaaggcgtgttgcaagttcgttagtgaaccagtccagccctttgccggcaatggtgtacctgagccgggatgtttttctgttgcagcgggtgctgaattctttatggatcaaaagcacctgccgggctacttcctccacctgttccgggaaacagaatccgataatatccgcaaggcgggggaaagaaccgggattgccgtaagcatagcccattcctccgccggccaggatgtcatatcccaggagtttcccttctttttcaatagccacgaagctcaggtcctgggcgtacacatccacatcattttccgggggaagcgtaaaagcgattttaaatttgcgcggcaaatagccgggaccgtacaaaggctcttcttccgcgcccgagtagattcgtttggcatccagccatatttcatgataggcgtgcgtctgcggttccagttttcgggagagttcccgggcttgattgaagacagtttcatggatgccggaatcttccgggtgcagagaaaccatgacattgcgcgtggcgtccccactggcggcaatcgtggtgatggccgcgtggtggatatctttcatggtctgtttcaagtcctgtttgacgactccgtggatttgaatggcctggcgtgtcgtaagtttaagggtgccgttgccgaattggtcgcttagcgtttccgcggctagccattggctgggcgtcatgcggcccccggggaggcgcagcctcaacatgaataaccagtttctttcctgtccgtttttcttccggataagccgttcatcccggttatcctgctgggtaatcccgtgaaatttcaaaagaaattcttcttcggacgggaaatgggtaatgctgccgtcatggaggaggtcagagatgtttcctctgaggaaatcgctttcctccttgattcgttcgttggatgtgtatccttctttagtcatgatattttctgttggttaagctaaattagtcccccagcgtctgtagatggcttgttccaggggggagaagatgagtttgtctgagagcaggcctatgagaataataacgaacatgatgcccatgacctgctccatggaattgagttctcttccgaagtgcaggagctgtcccaatcccagtcctgtcaggatgggaacaaaaatttctgcggacatcagggagcgccaggaaaaggcccagccctgcttcataccgctgacgatgaatggagcagaagccggaagcgtgacaaagagcagcgtgtaggcagagccggctcccattgtccgtgctgcgcgggcataaatcggagggacgttggcaagtccattttctgtggccagtatgaccgaccagacggtgcccatgacaacgacgaacaggatggccgcttcttcctggccgaaccacaggatagccagagggacccagcaaacgctgggaagcccttgaaatcccaatgccagaactccgatggtgtttctcattagctggaagcgggcagataaaagtcctgctggaattccgatggagattccggccaggtaccccaggagcagtctccggatagtaacgaccgtagcggcccagagagagttgtccctgattgcttcttcaagatagccgcttatggcggaaggcgccgggaataggaaaggcctccaccagccggatagagaaccgtattcccatatagccaaggccagcaagatgaatactgaggattggagaatattttttatggaagggtgcatgatgtttgtgcgtcttgtttttcttctgcgggcctggaaatcgattttaatgcccgtgtgatgtttgaagctagccgggccactcccggatcattgatttggcgcgggcgcggcaaacgaatgcagaattctccgcaaatacgtccagggtgggatgaaaataaaatgactctgtctcccaggcatacggcttcccgtacattatgggtgacaaagacgacggtaattccatgcccggcgcaaatggcctggaggtccgcataaagctgttccctggtcatggcatccaatgcggcgaagggctcatccatcaggagaaccctgggacgcaatgcaagggcccgggctatggccacgcgctgtttcatccctccggagagttcatggatacgagcatgtgcaaagttgtccaagcctactgatttcaggttttccaaagctatttggaggcgttttgcgcggggaattccggtaaatcggagaccgaattctacgttgtgcagcacgtttaaccaggggaacagggcgaaatcctgaaaaacgactgtcctgtccagtcccggtcctgagattatttccccatcataggagatgcttcccgtatccgatttgatcagaccggcgatcatattcagcagagttgttttgccgcaaccgcttggacctaccaggcagatgaattctccttcccctatgtccagattggcggaagaaagagccagaagcgatttttttctggaaaaataacttttggaaacgtttcgtatggataatctactcatgggcgggattatttttatcattccggatgatgccttcgacgtgggggagtttcttgtaaaatccggtccgtaccgtatccttggctaattcgtggagcttttcttcggatatttcattcgtgagaactaacctgggccacgcatggataattaaagcgggatcaatgttggaacgggtgagttccctcaattcttctacgacgattttttgagcttcctggggatgtccgatgatccagagagtgagttctctgtgagcttcaatcatggcctgcgccacgtccggctgtttttccaggaatcccttttgagctgtcagaacagtggttacggcatccttttcaagaaacaggagcttgcctccggcttctttttccaggcggctaatccatggttctacagtccaggagccgtccagtttgccttgacgcaagaggggtatctgttctgggttgggggtaggaagtatgcttgcgtctcctccggtttgagtgactgttacgcctcccagggccaaccatgtccggcaggctatatcctgagtattgcccaattggggggtagcgatgattttcccttgaaagtctttttgcgtgcatgctccggaatgggtgggaacgaccagtccggaccctccctgtacggctcccgctacgatttgcaggagagttccgttggatttggaatacgcattaatggcagggcccggcccaacgtaggtaaaatccagggaattggcgaacatggcttccatagcgccagggccggcgttgtaagcataccatagaatggagatatttttccccgtccgttcaaagatgcgtttttcaaaccatccctcccccgtgcggctgaaatgcctggcaaccagcccctggacatgggttacgttgggaaaaaggccaaagcgtatttgagcctgccgttcgggggcttcccgacaggatgccagaaaggctggagccaagagagcgccaacgcagagaagagcatttaatgcaagaggctgagttttcataaaatgatggaacgggtattaaaatgggataaaatcaaaattccacatagagagtgcgcgccagaagaaacgcggtattttcatttgcctttgcgggggggaggatgcggtctgccgtttctggagcggagacgacgttccccagccagatgcagtaggctcccttggtgtttctgggcaggacgggaagtctcggcaatactgcaatgctcatcagccccgcttcggccagcaggcctgaggcattgacgatttctttagcggatcttccccatacgccttccgccttgaaatccagaccgtaggtatgggccttgagccggtggagttccctttccagctgcttggcgaagctgcgcgccagttcgctgtcttctcccgctatgtaaatttgttttccgccatgcccgaaggtttctgcgcgttcatcgcttgaaacgaatgtcggaagttgctcctgttctttttcgggagccttatctctgtgaggagggcgaagcataccggctcccgccgtgacgttattcagcgggtcaatcaggatgaaagctcctccggagcggttatcccggtaataatcatagaacaagggggaacttgtttccaggacgatacggccgacatggttcagaggaagctgtgtcgcatggcggctttccagtgtattgacgtctatgtcgtactggagttctgctatccgcccctggatatttctgcccgcatggcgaatcatgtatttgcttccgggaagaaggggtttttcagacatccagatgacacgggcctccagccgatcttcgatatgggggagattcccttttttgacgatcatgtcaccgctgctgatatctatttcatcctcaagttccaatacgacggcctggggagagaatgcttcttccagatctccgtccggagtaacgatcctcttgatccggctgttttgaaacgaaggcagcgttacgacagggtcacccctgcggatggctccggaggtaatggaaccggcgaacccccggaaatcgagattggggcgtatgactgtctgtaccggaaagcggaaatcccggagattcctgctgtcgctggaatccagcgtttccaggatggaaagcagatgatctccctggtaccagggcgttttccctgttgtctgcgtcacattttccccttcaatggcggaaatgggaacgaaacgaacgtccgggatattcagctgttgcgtgaagcttccgaattcttcttcaatcttccggaatttttcttcagagtaattcagaagatccatcttgttgacggctacgatgaggtgccgtattttcagaagagaggcgatgaacgcatgccgcttcgtttgtgtgagtactccgtggcgggcatcaatcaggatgatggccgcgtccgccgtggaagctccggtggccatgttccgtgtgtattgttcatggccgggacagtcggcaatgatgaatttgcggcggggggtggtgaagtaccggtaggctacatcaatggttattccctgttcccgttccgctttaaggccgtccagcaacagggcgtaatcaatgttgcctgcccccgtagttccatttttttcactggctttgcgcagttctgccagctggtcgtcgaaaatcagtttgctgtcataaagaaggcgtccgatgagtgtagatttcccgtcgtccacggaaccgcaggtaagtacgcgtagcaggcttttattttcgtgttcgttcaggtatgagtcgatgtccataatggtaaaaagaagaggtgtcgtcagaatgattcataataggggttaaaaatatccttcccgttttttctgctccatggaggcatcaccgtcgtggtcaatgatgcgggaagaacgctcgctcagcctggtttccagcatttccgccacaatctcttctacagtgcgggctgtagattctatggctccggttagagggtagcagcccagcgtacggaaacggacggttctcatctgtggtgtttcccccggttccaaaggcaggcggtcgtcgtccgccataatcagggagccgtcacgttccacaatgggacggggtttagcgaaatacaggtccaccacctgtattttttccaggcggatatattgccagatatccagttccgtccagttggacagaggaaagatacggacgctttctcccggattgatacggccgttgtaaatgttccataattccggtcgttgatttttggggtcccattggttgaatttatcccggaaagagaaaattcgttccttggcccgtgatttttcttcgtcgcggcgggctcctccgaacacggcatcatattttcctgcggtcaacgcctgaatcaatgcctgtgttttcataatatccgtgtatttgcggctgccgtaagtaaaaggattaacgccggcggcaatgccttcctggttactgtggacaatcagatccagatcattttcctgaacgaatctgtcccggaattctatcatctcgcggaatttgaatgtggagtctatatgaagaagcttgaaggggagcctgccgggatagaatgcctttctggccaagtggaccagtacagaggagtctttcccgatggaataaagaagtacgggattttcaaactggctgatggcatcccggaaaatgtgaatgctttctgcctccagctgcttaagctggctgagtctgcaaatgctgttcattttgtatgttctttttttgattgttaatgtcttggcctgcggtgtaggccgcattccctgtgttctttttcttcccaccaccatcgtccgtcgcgtacgtcttctgtccttttgacggctcttgtgcagcaggcgcacccgatactggggaatcctgcatcatgaagaggattgtagggaatgccgtaagcgcggatatagttccagacatcctcttctgaccagtgggccagcgggctgattttgatgatgccgttcgcctcatcgttttctgtgatatgaagtcctttccgggtgatggactgggtggagcgtaatccgcaaatccacgcttttttcccggcaaggagcctttccagagggcgcagtttgcggatattgcagcatttgtgacggttttccacactattgcggaacaggttgacgcctttgtccagaatcatgctttccacttcttccgctgccggaaaataaggaataatgcgaatgccgtatgtttcctccgttcttgcccagagttcataggtttccggaaacagacgccccgtgtccagagtagccagaggaatattcaggccaagatgggagatcatgtgggtaagcacctggtcttctgccccgaatgatgtggcaaaaacaaggtctccttcgtattgcgccacggcctgttgcaacgtgtctgtagcggttggggaatgagcgttcatgaatgttgagccggttgaaggcggatagccgtatctggtagaaaaaaacgggatgtcagatgaacaggggagttgagtagtaccggtccgctgaatcgggaaggatcactactatatttttccctgtattctcttttctcttagcaacctggacggctgcccatagggctgccccgctggaaatcccggtcagaattccttctctgacgcccagttctttagctgtggaaaaggcatcttcattggaaacggtgatgacttcatcatagatatccgtatccagggtttctgggataaagccggctcctattccttgaatttgatggcttcctgcctggccggcggataatacgggggaatctgccggttccacggcaatgacggtgattcctccgggtttgcgttccttgagcagtctgcctatgccggttattgttcctccggtgcctactccggctacgacgatatctacttctccgtccgtatcttcccatatttcaacccctgtcgtttcatagtgggccctgggattggtcgggttggtgaattggctgggaatgaaggagcctggagtagtggccgccagatcctgggctttggcaatggctcctttcattccctggctgtcttccgtcaggacaatatcggctccgtaggcttttagaatatttcgtcgttcaacgctcatgctttccggcatggtaagaatgatgcggtatccccgggaagcggcaatagccgccaggccaatgcccgtgttgccgctggttggttcaatgatgacggaacccgattggagctggcccgatgcttctgcctcgttgatcatggcgagtgcgatacggtctttcatgcttcctgctggattcaggtgatccagcttgagcaggagccgggcattcagacgatgtgcctgggcataattccttggctccagaagaggtgttttcccgaccagttccgatatggaggtgtaaatgttcatcgtgacgtgctttacagggatggatttagatttctttttattccgataggaataatagggattagttactcttatcctccggaagtgtcaatatgaatcaaagaatatgaaatattattttattatttgtgtttttatgtaaataaaaatggtagaagagctgggaatggacggctgtaaaatttcagagattgagagtaaaaggccggttttctccgttttcaagctattggccgtgaaggtgaaaggatgcgtgcgaggggcagatgccttgtttccttgccttcctggagcatgcagttgtattgagtctctccggttgacgttatgaattattccttttcccggagagtaattgtggcgctgggaaaactgtttgttttgccccattccatcctttgccgcatatccctggaatgtttattgcctgtatgctgataatttggcagttgtgattatttgaaggatggtgtgcaaaaacacagctgttgagaagatgagccgttaggacttatgggggaagcctctgacgcacgaaattcggatcatgctgttcatcatgatctttgtatgggcaacagggaatcgccgtacaggcaggaattgttttatctttctcttccgtggcggatgtccgtggcttccttcaggaagacgacggtggcggcgatggttttggcaatgtctcctatccgttccagagaacggataatgaagagaaggttgacgttgagggaagaggagtcctcccgttcgggggagaccagaagggccagcgctttgcgatgggctttgtccagttttttgtcgcgcaggcgtatttccctggcggcgtccacatcctgcgtttccagacacctggcggcgtctctgaattcggatacggccatttccagcagagggagcacaatatccggggagagggattcctgatgcctgatggaggccttggcatgcttggcgatacccgttatttcctccatgcattcctggagcttgtctccgcatcgggagaaggtgatgacgagcctcaggtcgcgtcccagcggatggaactgggtgagtacggaggagcagagggagagaacctgccgggtttcttcctgcagcgggtcgctgtccgcaatgatgctgttggccccgtcgctgtccgggccggaaatgacccgttccagaatgtccatgtatttcagcaggcttccgcagatggcattgacgcggaggcggatagcgttcagggccgcgtcgtagtgggggaggatgtgattgccgggggatgtcatgaggagaatggtttggaatgggcttttagctgaaacggcccgtaatgtaggcttccgtttctttttccgtaggattggtgaagatttgggacgtttccccgtattccaccaggcggcccatgtacatgaaggcggtccggtccgcgatgcgtgtggcctgctgcatgttatgggtgacgatgacaatggtgagttcttttttcaggtcttccatcaggtcctctatttttaaggtggcgatagggtccagggcggcgcagggttcatccatcagcaggatttgggggcggttggcaatggcgcgcgcgatgcacagccgctgctgctggccgccggaaaggccgtaggcgctttcatgcagcttgtctttcacttcatcccacagggcggctcccttcaggcttcgttccacggtttcgtccagttccgcgcgcctgttgcggccggccacacggaggggaaagacgatgttttcgtaaatgcttttagggaaagggttgtatttctggaagaccatgcctacgcgcttgcgcagggagatgacttccacgcgcgggtcatacaggctggtgccgtcaatgcggatatccccctggtggcgcacgtccgggaccaggtcgttcatgcggttgatgttgcggagcagcgtggattttccgcagccggagggcccgatgagggcggttacccggttggtttcaaaggtcatgccgatgttgaagagaacctgtttgctcccgtaaaagaaggagaagtcttccacttcaatgataggctcgtcgtctgcggaggctggttcagtcatgggatggtgaaggagaatggggttagaagctggaggccgcgtattttttgcgcaggcggttgcggatgaggatggccgtgaggttcatgaccaccaccagcaggatgaggagcagcgtggtggcgaaaaccatgggctgggcggcgtccgagtccggagactggaagcccacgtcgtagatatgaaagcccagatgcatgaatttgcgttccaggtggatgaaggggccttccccgtcaatgggcagggagggggccagcttgaccactcccgtgaccatgagtggggctacctctccggcgccacgggccatggccagaatgaggccggtcatgacgcccggcagggcgctggggaggatgatgcgtttaatcatctgccatttggaggccccgcaggccagagccgcctcccgcagcccgcgggggacggcggagagtgcctcctccgtggagacgatgactacgggcagcgtcatcagggccagtgtgagggatgcccacaggatgccggaggtcccgaaagtgggcgtgttgtccacagccagctttttccagtagaaaagttcgtcgatgctccctcccagatagtaaacgaagaagccgaggccgaaaacgccgaagacgatggaaggcacgcccgccaggttgttcacgcagatgcgcacggcctgaaccagagtcccctgtctggcgtattccctcaggtagatggctccgatgacccccacgggcgtgaccagcacactcatgagcaaagtcatgatgaaggtgccgaaaatggcggggaagatgccgccctccgtgttggcctcccgtggatcatccgtgatgaaatggtacaggttgtggaggaagatgccgcattttccgaagaatcccaggtcattcggctggtagccgtaaacgattttatccatgcggatttctttcttttccccgtctcccagggcatacacaagagagtctcggccctgttgagccctcagtttggctgcttccgcggtgtaccgggcgtattcggcattgagctgttcctctttggcgcggagccggtccagttcaccggccgggtcgtccatatccgtgagaatggggtttttcctggggacggccgtacgctgtccattttctttccggatgtcgtaggaacgttctatggccttgatatcccgtctggcgtccgccagacgggtattgacggagccgatgtccctggtgtcaatggttttgaccctgtccctcaggtctgtttcccggtccagcacgcggcggaaagcctccatgaattccggtgaggcggcggggatggtttctccagaggccagcttgagttccagaggtttgaccagggctttccctccctccatgcgttccaggcacagaaggcctttgggggtggcggaggcagtgacattgtgcgcgtccacatagcggtaggattgtccataggattccttgctgccggtgaaaagctggtattcccgcacgtctttggctgtggagccgggatgggcggggtctgcggggacgtggcgcgtctggtcctttgtgatgccggcgtacaggacaagcggttgttcttcttttgaagaaggggcgagcgtcagttcatggatagttttgggccagaaggcctccagaccgttgaagacgatgatgcccagcaggccgaaaatcatgatgaggcccagggagagcccgatggaggcgagccagatattgacttcccccagggggcgtttgggggcgggcggaaggctgaagtcctgtttcatggaaggtggatggatgggaagggatggatggttcacacgacgttgaagcgtttgcggagacgctggcgcactatttccgccagagtgttcagaatgaatgtcatggagaagaggataaggccgcccaggaagaggacccggtagtgggtggagtcctgcgccgcctccggcagttccgtggcgatgttggcggagagggtgcgcatgccgttgaagatattccagtccatgatgggggtgtttcccgtggccatcagtacgatcatggtttcccccacggctcggcccagacctatcatcagggcggagaaaatgcctgcggaagccaccggaagaacaacggtgcggaccatctgccagcggctggcccccagagcctccgaggcggcgatgagggaaggggggacgttgctcagggcgtcctcggaaatggtgaagatgacagggatgacggcaaagcccatgatgaatccaaccaccagggagttgcgctgttcatagggcatgccgaagccgttgcgccacaggtctgcgaaactggcggcctggaagtccccgtctccccacaggcccatgacgctgcggcagaggctgatgaggggctgttccagccagtagcccaggtattcccagcagaaccaggcgcagagcaggatgacgggggtcatgacgatgtattccacaccgcggctgaatttgttgcgccaggctgcgggccgggtggtccagaaccatgcgatgagggccgccaggccgggaatgaggacggccatgcagagcagtgcggggactttgtcttccattctgggggccaggtaaagggcgccgaagaagcccagtactacggaaggaagggaggccatgatttccatgacgggttttaccacccgtttgacggcaggggccatgaagtgggccgtgtaaatggcggccgtgaccgctaccgggacggcgaagacaagggcgtacagggtgcctttcagcgtgccgaagaccaggggcatcagggacagcttggattcataatcatccgtgccgcccacggattgccagagccatttgggagaatcgtacccctcataccatattttcccgaccagggctttggcgccggcttccgggtgtttgtcttccagagagaagaaatggatgtttcctgatgggtccacggcaatggcggcgttgaattccgtattggcggccagttggaccggaacgaattctagaggtccgctgttccagcggatgtcggccgtggttccgtagcagagcctgagttcccgcggagtggagaccaggaaggaacggttgatgccggatgccgcgtaatgctgcaccggaccgtccatgggagagaattgcctggtctggccgaagaggcgcagggaagtgccgtccgggcgggaatggggataaaggctgaaaatcttaaggcttcccctgtcgcctcctatgaccagggacatgtctccgaaaagccagttgacggaagtcattttttcccctttccccagcggggtcggaatcatctggcgtctgacccatgtttccccatcttcatcataggagaagtaaagaagtttgtccgcgtccgtagcgatgacgaggctgtctccggaggctccgggcagcatggccgtggggcggccttccagctggtccgtcaggtcatggaatccggaaggcgccagttctccctcatgaagcagggagcgggattcttccagcgtcatcagcaggaggcgcgtgccctgttccgtctccacggttgcggtaaatattttccgttctcccgcgtccgcataggctatgccggatattttgccggggacggagccgttttccgtcagggggtagagagggccggcctccgctccggctttgtccgggccgtgggcattcgtccggccgtggacgttgagtccggaatgaacatggatgaggcccaccttgccggattccgtggcgatggggtaggcggtaagggatgcgtcataggaatgggcgcagacggtttcgccgtccggcagggaaacgggaacggaggacaggttcccggtagttttgtccaggaagaagatgtttttcccgttgccgtagacaaagggaagcgtgccggaagggtccaggccccaggttcccggaaccggagaggagggcgcggggtgctgccgttcttccacgtccgcgctctggaagagaggaatcgtaacggccagcaggaagaaaagaatgccgaaaacggctacaatgacggtgaatcctccgccgatgatggttttggtcatgatgcggtcaaaccacagcgtggtttttgccacctgaaagcgttccggaacgggtttgggctttctggaaggtgtgggggagggagcattggaactcatgacggcagagaggagaagttggagggcaggactccggcgggcgggccggagtcctgccccggcatgtgtttacggcacgggaagggagtgtttattcaatgctcttgagcacttctgcgctgactttggcgggaatcgggtaataaccgtccttggtcacgatttcctggccgtctttggatacgatgaatttgatgaattccctggtcagggtgtccaggggttctcccggtttcttgttgacgtaaatcagcaggtaacgggagagcgggtatgttccgttgatgcagttatcgtaggaaggctgtaccgccgcctttccgcttttttccgccagggagagggtttttacgccggaggtgacgtatccgatgccggaatagccgattccctgttcgtcggaactgatgccctgcacgacggcggaggaaccgggctgttccttcacggagtttttataatccccttttttcagggctatttccttcacgaacccgttcgtgccggaggcgctgtttctgccgtagatggagatggcttttcctttcatggagggcactcccgcatcgccccagtcggtgatgttggagccgccgcgcttgaaagtggaggagaaaatggagtcgatctgcgccagggtaagggcctggatgggattgttcttgttgacaaagaaggccacggcgtccagggccactttgatttccgtcggcttgtagccgtatttggcttcaaaggcggcgatttcctcccgcttcatctggcggctcatgggggcgagctgggccgtgcctgccgtgagggcgggcggcgcagtggaagagcctttgccttcaacgccgactttgacgctgggatattttttgctgaatccttccgcccagagggtcatcaggttgttcagcgtatcggagccgacggcgttcaggttgccggaaacgccgctggtgggcgcatacggcttgatgctgctgtcaacggtcacttggttggcgcccatgctcagggagctgagggcggcggcgatggtcaggattttggcgacaaatttcatggcgtctttttctggtgtgttgcgtcttccgtttccgtgccggcggggccgttcatggcggaagacggggtagtgataccctcccgcccccatggtgaggaagagaatcctggttaagaaatcgtcacaaacccggagtagccagggagccctgtttttgggataccatgcgtccagaggcgcaggacgcgccattagaagaacatgactccgcatccagcagcagccgaccagaccgccgtagaggtggattccctggatttttgttatgggagcaagcaatccctgttcaacgtcaccatgaaagtccctaggaacagggtgacagcgttcatcggcccttccgggtgcgggaagtccacgctgctgcgctgtatcaaccggatgaatgaccgtattccggaggcgcgcgttacgggaggctccatccgcattgatggggtggacgtgacttctccttccctggataccattcgtctgcgccgggaggtgggcatggttttccagaagtccaaccctttcccgatgagcatttatgagaatgtagcctacggattgaagctggcgggggtaaaaaaacgcggcattctggacgaggctgtggaggaaagcctgcggcatgccgctctttgggatgaggtaaaggaccgtctccatgcttccgccaatggtctttccggcggccagcagcagcggctgtgcattgcccgttccattgccgtgaagccgcgcatcctgctgatggacgaaccctgttccgccctggaccccattgcgacggtgagggtggaagagttgatgcaccgtctcaaggacaagtttaccatcattgtggttacccataatatgcagcaggccacgcgcgtttcggacctgaccggttttttcatgttgggcaggctggtggaatttgatgctacggagaagattttttccaatccctccctgaaagaaacggaggattacattacgggaagattcagttaacagagagacgattatgattttttcaaagaatatttccaaaaatggaaccgggcgtgttccccattttcccggctctggacggaggctggctgccagcgccgccaggaagaacagcctgcgcaggcagcatcttttttatcatgccggcaaaaccttatcccatcatcaagccaatattccgaatcatgaatcacgacgcgcacaccctgagggagtttgacgctgccctttcctccctgaatacgcatttgctccagatggcctataaggcgcagagcgcccttgatttggccgccgccggccttttgcagcagaatgagtcttccgccaaccgggttattgctgatgacgaagaattggacgagctggaaatgacggtggacagggaagggctgcatctgctggcttttttcagtccggtggcttccgacctcaaggtggtgctggcttccctgcgcatgtcctccatgtatgaacggattggtgatgaggccgtgaccattgccaaaagggccaacaggctgaataagcgcccgcgcatccgggaggctgccttggcggatcctgtctatcgggaaatggcggagcggttcagggctgtgaataaggctgtttcctcctgggacggggaggctctggcagagcttgtccctgcgctggaggatttggcggagcatgcggcgtccctgacggaggcgtttgcctgcttgcctgagcaatatcaggacaatctggtttccgttgcggatctggtttttgtgagccgttccctggaacgcatcgcggaagggctccaaaaggtagcggcggaagggctttatgcggcctcctgatgccgcgtgcctgtacaggaaagcccgcagcgggcgctgttgaagtgccgtttttttgttcggaaacgggattcaggcatgccgcctatctgacggtccaggtaatgctgcgcgtggcggattggccgggacgcagaatgacgctggggaagtggggggtattgacggcattggggaagccctgggcttccagcgctattccctggcgcgcctggggcaggtattccccggtatatacctggaggccgggagcatccgtcgccacaatcaggcggtgttgggattccgggtcaagaaggatggcggcaattttgtcgcccggttcggaatccagcacgtagttgtggtccagtccggcggcgatgtccgggtgggcggcggagttgcgttcccccagcagggatgctttccgcaggtcaaagtccgttccttccacgggaagaatacggccgtcggggatattggtcgcgtccaccggagtataggcggaggcccgtacctccagggtcatggaatcaatggtgggtttgccggacaggttccagtaagcgtggttggtgaggttgacgattgtggccgcgtccgcatacgcctccaggcggagatgaagggtttcttccaccacggtgtaggtggctaccacttccaggttgcctgggtaattttcctccccgtctgcggagtgcagggtcagcaccagcgtactgcgcccggcttcctgcacctgccagattttgctgtcgaacccctggatgccgccgtgcaggtggttggggccgttgttgacggccacggttcgggaatccccgtcaatggagaacctgccttttgcgatgcgattcgcgacgcggccgcaaatcgcaccgcaataacaggtgtctttcagcatgtcttcaaagcgtttgggccctacgatcatatccatgccgtccttgacgacggagatgatgcgtcccccgtagttgctgatgcgtaccgtcagcttgtcggaagacagttcaaacaattctacaggtgcgccgccgggtaaggtgccgaagatcatgccggtatatagcttggtcagtagtggatttccaattaataggccagtacgcgggaaccgttgttgccgatgatcacgcgcacgcgctgtccgacctgaatcgggttgttcctgctggcgacctggacgaccgtgtagttgcgggtgccgttccttttctggtccagacgcacggtgatgcgttccccggtcgtgttgttgacggccttgtcaatctggttgccggcaatgccgcccagaatggcgccgcccgccgccgtcgcgaatttggcgttgccgcccccgaacatggcgccggtcaacccgcccgccacggcgccgattccggtgccggtgttggcgttattggcctggatcttgacgttttccacgctggtgaccgtgccggtataggtctcctgggctccgccgatttcgttcaggttataggtgttcggggaaccgaagttggtgcaggaagtaatggacagtgccatggctgcacagccgatggtaagaatggaagctgttttcatgatgacgatttataaaatgggttgaaggttaagatcaagtaatttcgcagtcaacggaaggggcacggttgccctcttccggcggagaaaacccttgccggaaggttccggcaagggttcttatttatgttaacggttcgttgggtcaggccttgggggcttctccctttttggggcagtcgcagggcttttcccctttgctgcagggctggccgcatttttctgggcatttgccttccttggcgcatttcctggggcactttttgtctttcttgcagcacttctgggcagcgggggcgggggactccgccggagcggcggcttcctgagcgtaaccgttgacactgaaggcgaaagcaaaggctgctacagcgaggatctttttcatataatgatatgtgaggttgtgtggtgttggtaatgcagcggcagaagagctgccgttctacgacagatagagcggcagggagtgatatttgttcaaaaaaatgcgcggagaggatgctttttagggcggtttttttgatgaggacgcgcttttggcctccggggtaagtttgacagtccgggggaatgtacggagcgccggcttgcatggggcgccttcttgaggcacggtagggaacatgagttcagccaaggaacctgtgatgcgccgttttggaaatggtttgacggttttgattaaggaggacaagtctcatcccgtagtgtccctccagtactgggtaggcacggggtccatgaatgaggggcactggcaggggagcggactttcccatttgctggagcatctggtgtttaagggaacggcgcatttctccgggcaggaactggcccgcaaggtgcaggaacgcggcggccactggaatgcgtacaccagcgtgaaccgcaccgtgtactatatagacggtcctgcggagtcatggcagattttcctgaatcttttgacggagcttgtatttttccccacgttcccggaagacgagatggagcgggagaaagaggtcgtgcgccgggagatggccatgtatgcggatgatcccgattccgtggcctaccagcttctgatgcagacgctgtatctcaagcatccctgccgctggcccgttctgggtgagcgcgccgcctttgactgcctgacgcggcaggacgtgctggattaccatgccagccgttatgtcccgaacaacgtggttctttccatcgcgggggacgtggatgccgcggagattctttcccatctggaattgctggtggaagacctgaaatcccatcccctgaaccgggaacccattccccatgaacctcaccagttcggttcccgcagggtgcggaaggagtttgccgtgccttactccaagctgcaccttgcctggcgcctgccctgttccgcccatccggatacgccagccctttccgcgctgtccagcattctgggaggcggacgttccgcccgtttttatgaaaagttccatgaccgcctgggcctggtgtacagcattgaggtgcattccaaccagtctgagacggatgaaggggcgtttaccatcagcatggacgtggaccgcgcccagcgcgacaaggtgcgggacctggtgcttcaggagcttcgcaatctggcggaagaggattttacggaggacctgaagagagtttgcaaacagacccgggtcagtcgcctgcgccgcaggagttccgcttccggggtggcctcggaaatgggggcggactggttcggctcgcgcaatttgaacctgtcttccgaatggcaggaagctattgaacgggtgactacggaagatttgcaccgcgtttgttccacctggctgtcttccccgaatgtgacggaagtcagcctggaccccccgggcagcaacgccggggatgaagaaagggcctccgcctctgcgggaacggccctgagcgagcatgttcttggcaacggcatgaaggtggtgatccgtgaagaccatcgcctgccgctggcctatgcctgcatggcgttcaaggccggatgccgtgcggagaatgagcatgacgccggggtgacggacctgatgtccgagtgcctgctgaaaggaacctccacccgttccgcggcggatatagcccgttttctggaggacatcgggggagccatcaacacgtccaccggtaacaattccctgagcgtgggatgtcaggttctggcggaagacctggacgccggattggagctgatggcggatgtggtcatgaatccgtctttcccggaagacgcctttctgagggaaaaggaatcttttgtggcggatgcggaggaggatatggaagaccctctttccgtggcgttccggcaggagcggaaggtggcttacgggcatgtttcctatggaaattccccttccggcacgccggaaagcctgtcttcactgacggttcaggacatcaaaaaacagtatgaacgcattatctgcgcttccaacgccgtgatttgcatttccggagatgtcaggaaggaggaggtcctgcctcttctggaaaaacatctgggaggcatgagggcgggaacgcctccagccctgactcccacgcccgcgctgcgggccggccgggaagtggccgttctggataaacagcaggccgtgctggtagtgggggtgccgggcgtggacgtggcttccccggagatggcccaggctctgctgttccagtcctggtgcagtgatatggccggtcccgttttcaccaatatccgggaggaggccggactggcctattatgccagttcttccctgttcatcggcatggatgccggaggcatctgcttctatctgggcacctccccggaacaattggaggaagccgggcggaggctggaaaaaacactggagatgattgatgaacagggcatgacggaggaggaactggaacgcaccagggcggccgccctgtcttcccgtctgctggccatgcagtccaatggaactttgtgccagatgctggcgctggatatcctgttcggtctgcctctggaagcgtttgaacagcagacggacgctatcaggaatatggatctggcccggatgaacgcctttatcaggaaggtgctggatcccgcccagccgcgttcctggtccatcgtgcgttcgcctgccggggagtaattccccggaaaatcatttcctttttccctgtccgggaaaaaggcaggattaaataaaaaggaatatttttgcgttacatcatctgaaggctgggggaggggtgtagcggaatcgtgatttttattttagtggtgatgcgctatagtggcagccatgactgagatggagccggacaggaaaactgcggaacgggcaatcagggaagcgtataaatccaacccggggggctgggcggaacattcccgctatgtggcggaagcctgtaaaaatatagcctcgcactgtaaagggttatccggtgaaaaagcttatgtcctggggctgttgcatgatattggacggtatgccggagtaagttccgaaaagcatttgatagacgggtaccgctattgtgcggcaagaggctggaaaaaggcggcgcagatttgtatttcccatgcgtttatgatacaggatatcaatacttccatcggcacgtttgacgtgagtggggaggattacctgttcatgaaaaattttgtagagaacgcggtctatgacgactacgaccgcctggtccagttatgtgacgctttggccatgccgacaggtttctgccttttggaaaaacggtttgtagatgtgacactccggtatggagtgcatccgtttacggtggaccggtggaaaaaaattctgcagctcaaggcgttctttgagaaaaaagcgggctgttccatttatgagcttctgccgggcgtcgttgaaaacagtttccgccaggaggaaagccatgtgtgatgaagcggaagattttttggaaacggcgcatcccgatgcgctaaggtaaatcgcccgggcgagggaattgacaagggaatattatttttccgcatatagtgatacgcggagaagaagtgaaattctccgggaattactgggtgggattggggataacgtgatgatagatacgccctttcattgcgactacgggaaaaacatctttttagggaacaacgtggtcatcaacatgaactgcactttggtggataatgcgcccatccgcattggcagccaggtgctgattgcatccaatgttcagatttatacggcttcgcatccggtcttgccccaggaacgccttgtgacggggtggaaaaaaggtaagggaacatttttccgcacctatgcactgccaatagaaattgaggatcaggtatggattggaggcggcagcattctactgccaggtgtgaggataggaaaaggctgcgtcattggagcaggaagtgtcgttactcattctgtgccggccggctgcgttgctgttgggagtccatgcagggttatcaggtgtttttgacatcaacggctggaggccgccgcgggaggcggcggattcggaagcgcccctcttttctggcggaacgtttgatctgctcatggtaaaagtaattcacaataaccggcggttcgttgaacggccggtgcatgggatcgtcattgcgcaggtacggcaaaccccgtttttccgccagctgccgtattgctgcgtccagttcttcccagtagccgcggctgcctttctggtaaatttcctgatagaggggagccaggcgggggtagcgttttctgatgtactccagaattacgaatttgtagctgccccgcagattaaggttttccagccaaatcaggttgcatttgtcttcgacctgctcaacaatcgccggaatatccgtaatgcccggaaaaatgggggagatgaagcaggtggtgcggattcctgcctcatggaaggccttcatggcggccagcctccgcgagatgctaaccgccatgtccatatctgcctgaaagcgctcgtcaagcgtgttgacggaccaggaaacgcgggcatggggaaatgtttttatcaaatccaggtccctcagcaccaaatcggattttgtagctatgctgattttcgccccgctgtcttgaagctgttccaggagcgcccttgttctcttgtagattttttcctgggggccgtaagggtcggtcacggaaccgataaacagctgttttcccgcgtatttcccggggttgcgtatttccggccagtatttgacgtccagaaaggttccccatggttccggatgcccggtgaaccgcttcatgaaggaggcgtaacagtatttacaggcgtgggggcagcccaagtaaggattgaccgagtaatcggccacaggcagatttgacgttgacaggatgctctttacctgaatttcccttactttgatttcatcagcgttcatggttttaaaaagctcctttgcattccctgctgcacggtatcggaagggagcagatgccccagcagcagcggagagtccgggtcatggagtttgtaattttcacgggccttttgccggttcgtatttgcatagcagtatttgcagccgttaaggcaggtgtcatacgctcctatgtcccggctctcaatgcaatggcagccctgccgcaatccttgatgtttcaggttgcggaattgaacgccgttggcctgtcccagaatgttcagggtcatgcagccggaggatgaaatgccgtaacgcgtgtaatctccattggttccgcaggtttgaatagggatgttgtatgcggccgcgatggctcccagcccggccgccagctcctccttgtctttttccgtgagggggattagttccggcatgttggtttgcagcttcctgtacatttccacaaagctgaaaatgcagcggtcgatgtggccggataagaaggacgccatgcgttcaaaggtctccagatgccttctgacggtatattcacttgtcagcaataccgggtcataccgccatgcgatgcggtttgctccgacaatttccgaaagttttgccagcgtggccatgctttcatcaatgccgggaacccccggttcaatttcctttccgtaggccgtaatcgtatagtggaagtaggtatggaaacgctcggcgatgctgttgatatgcggaagaatgggagcataatttttagagcagaacacaacacagtccacctggtccggcgtcagttcataacgggtcaccttatgctggaacaggggattgcgggaaaggacatagccttcttcaaacctcttcagcagccagcgggtgtaatactggacggtgtctgtccgtcctcctgtattgataatcatagcgtgtttttgttgatggattgaaatttcagacgcatttgttctgaaaaaaggtcggttaaacggaccagttccgcttgctgttctccgctcaattccgccatggcgtcgttttccgcctgcgcggcaggggggatgatgcgttccacgtattcctttccggctgcggtgaagcgtaccagcctgattctccggtcggttttggattcttcaaaagaaaggtaccccagcttccagaattttttgatggcggcgctgacggtttgcttcgtggcggagaggcgttcgcaaatcccagcctgcgtgcagccgctttgagcgaaatagatgatatccagaataaacagctctttggtggttaacccgtattttttggcgtattccgtatagacggcatattgtttgtcccgcagccggcagtagttgtttacgtggatattgacgctctctttgctcataggcggagatggataaagtatgatatttgatagtctgatatttgacaaaaagaatgtagctattcgcgcgttttttgtaaagccccaaatataaagctccagataaagaggcgggggatagggacggctttttgcgtgaccaggcaaatttccggaaacagtactggagcggcaatggatgccgacctttcaagaatccggtacattttccgtttttattcccgtatcttctgtttcgcggcagaagagttttgttgccgcatggcttcggaagacaggcgcctgtggctaccggggaaacgtttttccatgtttacgggagttggagagcttgcccgatggggcttttctgcaccagagcaagttccgcctgctccggtgactgatgtttcgccggaggcggggagagagcgtggagactcaataaaaaacgcaggcggcgatgcgcctgcgcggtatccggcgatggttcggacagaagaaagaagcggtttttctgccgtagggtatttgtgtaaaacggcatccgtccgcttcctgaagaacgggagatgatccgggcgctcccagcaattccgcttccggagcgggaacggtatttggaaaaaagggcggtacctttttccgttcttcattttcgccgccccctgagaaaccccggcgtgcttttacgcttttggaggaagcggcccgtacaaggcacgccagggaagaacagggcggctgttttttagccgatttccgtgcggcccagcaggtgggcgccttcctccatggcgaggctgcgtgtcttcatgtccccgacgacgcgggcctgctgcttgagttcgcagcggtcagaggtgaccttgccttccacgttgccgtagatgcggacgtctccggcagtgatgtctcccttgatttgggcggtttcaccgatggtgacttttcccttgtcggagatgatttcgccttcgattttgccgtcgatgtgcatgtcattctggaaacggatggttcccttgatttcgatgccggaggcgaggaagttggttacgttgtctgtcattgtcgtcaaatggttggggatggggttaaatggtcatgatatccttttccttgacggtcaccagctcgtcaatttccttcacgtatttgtccgtcagcttctggatctgcgtttccaggtcgcgctggccgtcttccgtgacaatgttttccgccttgagctttttggcggaatccatggcggccttccgggcgccgcgcacgcgcacgcgggcttcttccgcctgggatttgacaagcttcacaaggtctttgcggcgttcttccgtgagggcgggaatgggcaggcggatggaacggccttccaccaggggattgaggttcagcttgctttcattgatggcgcggccgatgtcgtgaacggtgctcggatcaaagggctggatgaggatgagacggggttccggcgtgctgatgacggccaggcccttcagtttcatgacggagccgtagctggagacatgtacgtccaggttttccacgaggccgggggaggctttgcccgtgcgtacgccggagaattcctgtttggcgaagtccacggccttgagcatggattcctccgtttccaataataatgtttctgcgtccatgatgatggtgggtgctaagtgtttttggcgggttgaaaaggaatgcggggttcagctgatggtggtgccgatcggttccccgagaagggcgcgcgtgatgttgcccggagtatgcatgtcgaatacgatgatgggcttcttgttgtccatgcacagggtgaaggccgtggagtccatcactttgagctggcgttccaggcattcctgataggagatggtgtcgaatcgcttggctccggagacttttttggggtccgcatcatacaccccgtccacggaggtagccttcatgaccacttccgcattgatttcgctggcgcgcagggcagccgtggtgtccgtggaaaagaacgggttgccggtgccggcggcgaagatgacgattttattgttgtccagatacgagcgggccttcaggcggatgaaggattccgcgacatttttcatttcaatggcggactgcaccacgcaggggactcccgcgcgttccagcgcgctttgaagggccagggcgttcattacggtggcgagcatgcccacgtaatccgccgtggcgcggtccatgccgcgcacgctggctttcgccccgcgccagaaattgccgccgcccacgaccaggcctatttggacgccggcgcggtgcgcctgggcgatttcttcagcaatgcgggcgacgatttccggggaaatgttgtccatgctgccggggctgcgcaaggcttccccactgagtttcaggaggattcttcgataggcgggtgcggatgtgtcagacatagatgcggattttacgcagacaagattgaaatttcacggggcaaaaagaaagcaaaaagagattctttattgatttttctccggaggtccggagatttccaccttgatggggcttctgctctccaggctgcgggtggggaaggggaaggaaatgccttcttcctcaaagcggcgtttgatgtcatgggcgagcgttttctggcagtccaggaaattgtctttctggcaccaggcccctacggtaaagcccagggaagagtcctgaaaccctgaaaacgagatgaggggcgcggggtcgtccaggcagaatttgttttgtttgaccacttcccggaggacgtttacgacatgctcaatgtcgcagttatagtccacgcccaggctcaggtcgcaccggcgcgtggaaaaacgggtaatattgctgaccgggtttttgatgattatttcattggggatgcgcaccatggtattgttcggcagccggagctggacggacatcaggttgatggagtccacgttcccggtgattccattcacttcaatcatatcccccaggttgatctgcttttcccctaccaggaagaggccgctgatgatgttggacagggaagtctgggaggcgaagcctacggcgacgccgatgatgctggccgcgcccagcagggtcaggatatcgaaccccatcagggcaaaggcttccacgcctataataatgtagccgacgtttttgacgatttttaccgtcaggcgggaggcctggggcgacattttcaatacagtgattttccggagcacctggcagaacagtttcagaagtatccagctgaccaccagccaaaccgccacatgcagaattttaactcccacggactgcaccatttccagtttgagccagtccggcatgttcaggaagtccatggtttttgtccagatgtcttccctggaggatgcgtctgccatgagattcatatgaaggatgtagcaaacgctactgcccggctcaaggggcgcgcgcgtattccccccggtttatgacagttcctccggcagcggagaggacaggactttcaggcgctgcggacgcagcatttatcccgcaggaaaggggggcggatgtatggccggatatggcatctggttgggaaacaggaaaaagcggggatgaaaaaaggccgttccccggagaggggagcggccttgaaatattgccggagggctgcttacttgctgaggtaggaggccacgccttcgtgggacggggtcatggccgcatctcccttgtgccagccgagggggcagacttccccgtacagttcgaagtgctggagggcgtcaaccacgcggatggcttcatcaatggagcgacccagcgggaagtcgttgatgagctggtggcggacgatgccgtccttgtcaatcaggaagaggccgcggtaggcgatcagctccccattgacttccacattgccgtcttcgtcaatttcctcatctccggccagcacgccgtagtcggcggaaatggtcttgttgatgtcggagacgatggggtaggtcacgccctgaatgcctccctggctgcggggggtgttgacccaggcccagtgggagaattcgctgtccgtggagcagccgacgacggctacgtcacgcttgtcgaattcgcccagggcttcctggaagccgatcagctcggtagggcacacgaaggtaaaatccttcgggtagaagaacaggattacgtactttttgcccttaaactggtcaaggctgaaatccggtacgatggtaccgtttacaactgcgtttgcactaaaatgaggtgccggttttcctatgagaagcatggtcgtttttttggtttggttctaaaagaatgattccaaaaaacggacgaaagtcaagaggcaatgataccgcattcgttccaaaagagcctgttttctcttgaaaatgaagctttttttgtcagtattccctccatgtcatcctcaaaggcgcaacaagatgagtggtccggaaaaataggcgtgattctcgcagtggccggcagtgccgtcgggttgggaaattttctgcgctttccggggctggctgcccaatatggagggggtgccttcatggtggcttacggcctcatgcttgttttggtgggcgtgcccgtggcgtgggcggagtggtccatcgggcggcgcggcggccagatgggcgcccattgcgcccccggcgtgttctggtacctgaccaaagggtccaggctgtggaagtttctgggcgtactggcggttctggggccttcatccgtggctttttactacatggtggtggaagcgtggtgctgcggctatttctggaagatgctcacctgtccggaggtttttgccacggcggaggggacggctcagacttttttcagtttcacgggcatgtacggtgacggaagcgccctgttgtcggacaatgggctgctctggatcgtcggcggggttattctgctgaacctggtaattatttaccggggcatcagcaagggcatcgaaatgttttcgcgctggttcatgccgttgctgcttttgatttccctggtgctgctggtgcgcattttgtgcatcggcacgccggatccctcttatccggaccgcagcatcgaacagggactgggatatatgtggaatcccagcaaagtgctggtggaggaactggaccgggacagcggggattggaaaacggtttccatggtatcggcctcccatgcgggagccctggatgaagccgtgaggcaggtggagatgtccggcggaacccgcaggctgactgaggtgaccttgtgggacggcctgaaaaatattgagctttggatcgctgctgccggacaggttttcctgagcctttccgtaggaacggggctgattctgacgtatgccagctatgtcaggaagaaagaggatatcgcgctgagcggcttttcggccgccgcctccaatgaagtgtgcgaggtgggcatcgccggcatgatgacggttcctgccgccgtggcgttcctgggagtggccggagccgccgggcaggggaccttcgcgctgggcttcatggtgctcccgcaggcttttgccaaaatggggtccagcgtggtattcggcagcctgtttttcctgcttctgacggtggcggcggtgaccagctccatttccatgatgcaggtgggcctgtcctttattgaggaattcatggggctgaaacgcaaaatggctgtggtggtgcagggcttttttacggctacgggcacgtttatcgttgcctggtacagcggcaatctgctggcgatggatacttatgatttttttctgggcacgctgtgcttctttgtgagcgccatggtgatgatgattcttttttcctggaaactgggggtggaccggggattgaaggatctggaggacagttccgtcatccgcattcccagaatttaccgtttcatcatgaagtttgtgacgcctacgttgctgctggctattttcctggcctggctggcccagaatatctgggtgaagcaggccgcgcccattgaagcgctggggcggggggaacatggggcggtcattcccatggggtttctggcggcttatgccctgtttctgcttttcatcaccatggcgtccggaaggcataaggtgtaccacggtccgcgataggcgcggaaaggactgcgcggatgcccgtttcccgcagtctgcggcaagttgggaggcaatccggaggcttgaccggagccggatttgatataggctgaaatcatgtccagaataaggaggatacgcaggaaaaagccccgtaccggcagcgtctggaaaaaactgctgttgtggggcgtgctggggctgcttgttctggctgctgctgcggtggcggggtcttatctgtatgtcagggcctacttgaagagcgatggttttttagccatgctggaacagtccgccgttgatgatatgaatgtggagacagccaggatagatccccttgactgggacggttccggcatccggtgcggcggcgtagtaatggaggggcatgagtttttgacttcccttcaggccaggaatattgagacggaattcagccgctgggaattgctgaagcgcgcttttgtcattacctccgtcaatattgcggagctgaagcttcatctcgctcccgtgtctttccgtttcagggaaaagccggaagggcccaggagctgggcggaagagaatattcttccggatacgttccgtctggaaaaggggagcattgattccctgtccgtttcctatggggaggccggccggctgtatgttttggacggggcccgcgtggagagcgcctatgacgccggttccagccagtacaggtttgatgtgcgcgggggaaagctgcttcttcctttccagggatgcccggagttttccctgatgtccggtacagcgcagtttaaccattccagcagaagggtgaacattccgtcctgccgcctgactacggatgccggcggttatttggacattaagggggactgggacggctcttcctcctcctggacggcgaatgtggtggtgaacggtgtccctgtctcttccatcctggaagaccattggagaaagcatgtccatggcagcgtgagcggcggaatagacctgcgcggcggacgggacggcgtaacccatgtggccggacttgccaggttgcagggcggcatgctgaccggccttcccgttttagaccggctggctctgttctgcggttcttccagatttcggaatcttcccctgcacgaggcgtccgcccagttcgtctatcaggaatccgcctggcatatttccaatattctggtggaaagtgaaaacctggtgagggtggaaggctggctggaaatcgggaaagggggggcgctgaccggaaggctgcaggtggggctgcgggccgacggcctgtggaaagctcttccgggtttttccgatgtgttttccgtttcccgccagggagcgggaggcaatctggcatgggccaatgtgaatatcggagggacgctggacaacccgtcggaggacttgtccgcgcggctcatcaaggcggcgggaaaccgcctgacggaaataggaatgggcaaggcggctgaagtggcggatgtcgcggcgcggctgctgaacaggggaaccgagaaaaacggagcgggggatggtgcggaacataatggccgcaagttcaggattcccgccgcggacgaagttcccgccccggttgtgccacagctgcaggacgctgcggaaaaggggcttaaaacagggaatgacctgatgaacgaattaatgaattggtaacccgttttttgcagatgaaaacttatccctgccaaatggtgcaggcggtcgccgttatcgtggagcgtatcgcggatacggctttccgcgccacccttccgaatggcaaaaccgctgtggcttttgtagaaaaaaagaacgcttccctgagggagctgctcaagccgggcgaccgggtgaacgtgacgatttgcccggcggattttgaccgcgcccgaatagacggcatggcggaatgaggcggtgagtttttcccttcatcattgggggaaagaggcatcgcgcgaggcaggaaaaccgctgtaaaacggaactgtccccatgacgggattccggacggtgaagaacgggggcatgggcgggaatttccccgtgccgggatggatgcgggaagggctttcctttacagccgggtgcgtccttccagagccttcatcagcgtcagcgtgtccgcgtggctgaggccggagccggcaggcagcccctgggcagggcgggatatcctgcaatccatttctttgagcagatggtggaggtaggtggccgttgcctccccttccacgtcagagcctgttgccagaatgacttcgcaatcaggctgccgggagatgcgttccatcagggattgaatgttgagatcttccggctccacatcatccagaggggaaagcttgccgcccaggcagtggtacaatccgcggtaggcgctgctgcgttcaatggggatgacgtccgtggcctgttccaccacgcagatgaggcggctgtcccgttcttcatcccggcaggcgacgcagggttccccttccgtgctgaagaagccgcagacggggcagggcgtgacgtgttccgccgcctggccgatggtgcgggcaatcgcctccgcttctcccatgtgcccctggagcatccacagggccatgcgttccgcgccgcgggtgccgatgcccggaagctgtttcagggcggttaccagttcaagcacggggatgggatagtccagattattcatgagcggaaggaggttcggaatgacgccggacaggaggcgtttggggacagaggatggcgagcacgcccgcgctccctgcggaaagcaggcatgggacggcattgaagaaaagaccccacagccccagcaccggggtaaagctggccagaagaaggaggaaaacggccagaacggccgttttgcggagcgtgccgcggatgagcagcaaatcgtaaacgagggccagcgtcaacgccatgcacagcaggaatcccgtgccgggagaaagggcgggggcgtccgggggaagcagaaacggggcggaggccatggcttccttcagctcccgggcccagacgggagtaaggcccaggtaatagagcgccacgagcaggctaagcccggctacggagaacagggcccagcgcatgagcagaatgtcctggtgcgttttggcgggcatggcttttaaatgaaaaaagcggaagcgcgatggctgcggtggccgcaaacatcagcgcttccgccggaaaggagaggcctgaaagggtcaggcgaatcgtttcacgatgacggaggagttatgccccccgaagccgaaggaattgctcaggacggcgtccaccctggtttcacgggccttattgggcacgcagtccaggtcgcattccggatcctggttgtccacattgatggtgggcgggatgatgttgtcctgcatggccatcaggcaggcggccagttccacgcctcccgcggcgcccaggaggtggccggtcatggatttggtggagctgataagcagtccgtttttagcgtggtcgccgaaaacggacttgatggctttgatttcgcagatgtcgcccagcggagtggaggtgccgtgcgtgttgacgtagtcgatttcttccggcttcattcccgcgtgttccagagccatcttcatgcagcgggcggcgccgcggccttccgggtccggggcggtgaggtggtaggcgtccgcggagatgccgtagccgacgagttccccgtaaatttttgcgccgcgcttttgggcgtgttccagcgtttccagaatgacaacgccggcgccttcgcccatgacgaagccgtcgcggtccacgtcgtacgggcgggaggcccgctggggctcgtcattgcgggagctgagggccttcatgttgctgaacccggccacgcccgtgggcaggatggtagcttccgctccgccgcagaccataacgtcggcatccccgaatttcatgatgcgccaggcttccccgatgttgtggttggaggtggcgcaggccgtgacgatggacatgttcggaccgccgaggccgtattccatggagatgaggccggaggcaatgttgctgatcatgtacggaatcatgaagggggacacgcgggcaggccctttggaaagaagcgtggcatgctggctttccagcgtgccgaggccgccgatgccgctgcccaccatgacgccgatgcgggttttgtcctccgcttccagatccagcccggaatccttgagagccattccggcagcgcccatggcaaagtgcgtgaagcggtccacgcggcgggcgtccttgggcgtcttgaagtacggggcgggatcgaaatccttgacttcaccggcgattttcgtggagtagccggtaacatccatggatttgatggtgtcaatgccgctgcggccagccttcatggcttcccaggtggatgcgagatcattgcccagggggctgatcactccgatgccggtgataacaattctgcggtcggtcataataagtgtgagtggttgcaaataatgcttgaaccagaataggcgacattgcgggaaagtcaagctaatcccccctgtttcccggcacgggggaaacaggttgggcggaaaggcgtatcctgcttacggcaaggattttgcgggtcaaggatattccctgttgcctgctgaggctccggggccgtgaacagatttcagggtaaattccgccgcggcggccgcatccggcagcgcacggaagggcggccggatatttttccctgccgcgcgcctttaacggggggcatccgccgctatcggaagaggggctgcccggaattccagggaaagggaattgacgcagtagcgcagattcttcggagtcaggcgttctccattgaaaatgtgtcccagatggcctccgcagcgggcgcatgtgatttccgtgcgccgcccgccgcccgcatggacgcttgtgacggcgtccggcagggaatcatcaaaacagggccagccgcatccggcatcgaatttgtcttccgaccggaacagaggcgcaccgcatttgcggcaggaatagatgcccggctcaaagaagctgacgaattccccggaaaagggcggttccgttccctggtgttcgataatgcgtttttccgtttccgtgagggggcggcgcgtgcgggcagggccgggatcgggtacgtcccgggaggcgggaatccctccattcacggccatgactccagccacgccttccgcaatcatgcctatccatgacgcccagtgtctccgttcttcctgatccatatggcttatgaccaggttggagcgggttttgctcattcctgaaacaatatcttgtggatattaccgtttttaaggggggagccctgaaaatatggcagtctatggaagagttaatactccagctccagccagagctgttcccagatgccctgccgctgttcttcctggggatgggagacggacaggcccagaaggcggaatgtacggtccccggaatccagttcttccatcagggtgcgggccagggggaggattccttctttctccgtcaggatttccggaacggtcgcgcagcgggtcttctggacaaagtccgggaacttaaccttcagggtaagggtgtttccccggaagccggaacgggccagccgccccgcgagttcttccgccagcagggggaggcgttgttccagcgcttccgccctggtgacgttttcccggtaggtttcttcacaacccacggatttgcgcatgcgggaaggttccacagggcggtcgtccacaccgcgggcgaagttgtagaagatggctcctgttttgccgaaatgccttatcaggaattctttgtcccgtgcccggagctgcgccccgttggtgatggaaagggcgcgcatgcgttcggcggtggcgtgcccgactccccagaaagcttcaatgggaagtgccgcgatgaatttttccgcccgggatggatggatcgtgaacagcccgtccggcttgcggtaatcggaagcgatttttgccaggaatttattgtaggaaacgccggcggaggccgtcaggtgaagttcccgtcggatttccttcttaatcctcctcgcaatgtcgacggcgagcggaatgcccggcttgttttccgtgacgtccagaaaggcttcatccagggaaaggggttccaccagatctgtgtaacggtggaaaatggcgtgtatctgcgcggagacggccttgtacacatccatgcggttgcgggtgaaaatcagatgggggcaaagcttgagagccttcatggaaggcatggcggaacgcactccgaaacggcgcgcctcgtaactggccgccgccaccacgccgcgcatttccggcctgcctacggcgatgggcttgccgcggtattcgggatggtcccgctgttctatggatgcgtaaaaggcatccatatccacatggatgatttttctctggttcatgggggcgcttcatgattcctgacggggcggaaaacatgaggaaatgggatgccccatcataatccggcttatccagcaagtccagttggaaggagaagctccggcagggaggcgaaagaaaggcggatttttggggaacgggacgatttaagtgaaaaaatcttccgggtgtggtacattccgggcatgcccagaggaatgaaggaacgcctgtgccggggtctggaaaaggcgctgcatgtggaaccccgtgaattgcctgccgcagcggggggaattgttctgtttttcctgctgttcctggcctattccatgttaaggccggtccgggagacgatgggcattgccggaggcgttcagaatttgcagtggctttttacggctacttttgccgcttccatagggatccagtttttatttgggtgggcatcctcaaaagtgcgaagaaaggccattcttccgtggacgtacggttttttcattcttaacctggtggtttttgcggcgcttgtgctggcatgcccgggaaatatctggacggcccgttcgttttatgtgtggctgtccgtatttaacctgcttaccgtttccgtggcgtggagcgtgctgtcggacgtcatgaagccggggcagatgaaacgcctgtttgccctgattgccagcggaagcagccttggggccattgtggggccggcggtgacggccgcccttgccggcgtggccggccatctgtggctgtttcttgccgccgctgtttttctggcgctggcgatgctggcgggaatgtatttgcaccgctggcgtgacaggacttccccggaaggagcgggtgtggggattcctcttccggccgactgccgggaacgccctctgggagggaatccttttgccggggcgtctgccgtgttccggtctcccttcctgatgggcatcgggctgttcattatcctgctggccgggaccaacacgttcctgtattttgagctgatgagcgttgtagcgtcttccttccctgatccggtgcgccagacgcaggtattcggagtactggacgccgttgttcaggggtgtaccatgctgcttcaggtatttctggcggggcgcattgttcggaaattcggattggcggcattgctggcggctgtccccgttcttgtttccctgggttttgtctggatggctttcgctccggtatttgccgtcgtggccatagtgatggcggtacgccgcatcggggaatacggaatggtgcgtcccggccgtgaaatgctgaattccgtattgtcccctgaagaaaaatacaaggccaagagctttattgatacggtcctttaccgtggcggcgacgccgtcagcgcatggctgaagagcttctttaacgtgttgggctcccattccccgtgggccatgctggccggagccgccatttccctgctttgggcggccaccggcttcctgcttgcgcacaggttccggaagatggccggagttcagggaaaggaataatccccatgacggggaattctccgtcttgtccggatacggcctgctgttgcgggaatttttttcaggtcaaggctggcgtgatgcccttaatgcggcgggagcggcaggggggaaaacagatgttttttcctcccggtgacagattatttctggaatatttttttatttgacggcggtttccgatgtggcgccgacattcggattctcaatccgctccatgaaccggcttagaggggaaattccatgtacaatatctcctgcggcatccaaccaccatttcgatgtttatcataatttgtttatattaaaaagattgtatttctatcaacaaggtgtcgagaaaatcagcctgtctaaaaaacaatagaggatgcctggcacggaaggatttcctttggaggagaaatcatcctgaaaacagcttctcgatgatacttaaattgttttcccacaatatttagtattgatttcggattgagaattcgttattgggttcaaagcctcttcgggtgaagcaggctagtcatcgtttcgttagatgaatcaatcattactcctattattatattcctctgataatgaagaagacactcattacgctcattgctctggcgggaatagctcatgccgatttcacatgggatggcggcagtgacattacccagcagctttggcagacagaatccagctggattatcagcgagtcagattcctggccggcagccggaaccggccccggcacgcccaactccaatgcctggtctcttatttccgtttccaatgcgagcggttccatcacccagctggaaggctggacattgaagcttgccctcagcaacggcgcggatttgaccgtagggaacgtcaagaaattccaagggggctgcactattaacattgatcagtcatctgcgctgaccatcaatggttttagcggcggcaacgacggcgggatcacgacgttgaacaactacggcacctttaacctggcttattccaagagccagggaggtgaaggctttaacgtcaatttgggagccacgggcgtgatgaaccttacttcttccaacggtaattcatacaatgccaagatagcaagcctgactgctacgctgactcttgacggaggcaccgccagcggagtaaccgccgacggacatcaaatcctgacccggaatctggtttccctgggggataatatgtcttttgacggcacgaacacttccctggaaatgctcagcggcattgcaggcgttgataccctcactgcggtggacgatttgactaatgccgaagtaggttcttatatggttaccaagaatggggacgggtacagcgtttcctatgtggttcccgaacccgcagcggcttccctgagcctgctgggcctggctggtctggcgatgcgccgccgccgcaagtaacggcaaacttggatttctgtttccatgcagctcccttccgcggttaacggaagggagttttttattatttaacggaagggcggcgtatttccggaagacgtccgggcggaacgggagagaaaagccggtagagtgcacacgcatgggcctgtttttccccggaggatgccgaacccggattagttcctgctgtggttctgcaaacctgcacaaaagggcaggacgcctgatgttgccaagaataaccgcttcttttcaaaagaagtggtaggcccggtaggaatcgaacctacatcgtcggtaccggaaaccgatgtcctatccattgaacgacgagcccatgttcccgaggaacgagagaaatagaatagaaaaaacgggccggatgcaagtatttttatgccggtgacgggattggcatgatgaaaatatgaaacggggaaattcagggcagggaggtttccgggtattccggagagaaggaaggggtgtcaggaaattttgtgatggaaagaaaagacggcagccaggacggccaccacggtaacggccatgatggccgcgaaaaggggccagagatccaggaagctggctccttccagaaagatacgctggatgagttccagcccgtatctcatggggttgagcagcgtgaggctctgaaagatttccggcatgctggagatgggcgtggcgaagccggagagcatgaccatgggcaccagcagcaggaaggttcccacaatggcctgctggagggattgagcaaaggaggagatgcacagcccgatggccgccgccgtgacgatgaagagcagaagggcggcggagagcagccagatggagccctggaaggggatgcggaaccagaacatggctaccagcactacgaagacggcctgtatgattccggtgatgacggaggctgtccctttaccgagcaggatttctccgggggtgtacggggcgacgagaagctggtcgaaggtgccttcctcccgttcgcgggcgatggagagcgctccggagaggatggagttgatgagcacgagcacggcaatgaggccgggaacgatgaaccagcgggtgatgaggttggggttgaaccatgcgcgggattctatttccaccggggaggatccgccgttttgggagagcagatccgccccgtaggcggaggcgatttgctggccgtagctgagggcgatggccgccgtgttcgtgttgcgcccgtccgcaatgagctggagggaggcgggcctccccgtctgaatgttgcgggagaagtccggggggatggtgagccccacgacgatttcccggttgtctatcatgcggtcaatatccttttccgtggccgccgtggcctgcctctggaagatgcccgtgccttccaggtccgcgatgtactgagaggccgcttctccgccgtccttgtccagcacggcgtacggcacgcgggtgacgttcatggtggcggcatagccgaagatggctatctggatgatgggcgggatgatgagggccagccggctttttttgtccctgagcacggccagcagttcttttctgacgagggaggctattctgacgagaaagtccatggcgttattcgagggatttgggggctttcagccgggcgatgcccatgagcgccacggcaaagacgcccagcgtgatgcagcaggggatgatgacggaggggatatccccggccaggaagagggtctggagcagggtgacgtaatagcgggccgggatgatgcaggtgatggcccggacggcggggggcatgttgaggatgtcatacaggaagccggagagcatgagcgccggcatgaaggtgcccatgatggcgaactggcaggccaggaactggtttttggcggcggtggagatgaccagccccagcccaagagccacaatcaggaacaaggcggagaccgccagcagcagcgtgagggagccgcggatggggatgccgaagacgaaggcggcgaaaatcatggagatggccaggctgaccatgcccagcaggaagttggtggctgccttggccgtcaggatttctccgctgcccacgggcgtgacgaagaggctttccagcgtgccgcgttcatattcccgcgccatgaccagggaggtgaggagcgccccgatcatggtcatgatggtgacgatgacgccgggaaccaggtagtagtggctgtcgttggcttcattgaagcgggtgcgcgtctgcacgtccagcacgggtgctgtccgcccgcccagggaagacgcccaggagccgacgacggcctgaaggtagttgcggatgagggtggcctggttggcattgactccgttgacgacaatctggactttcgtgattccattgtggagcgtgtccggcgcgttgctttgcagggcgatgaaggcgtccgcttcatgggtgcgcagtttttcttcagcctcccgggtggagaagacgcgcgtggtctggaaatatctggagagggtaagccttgtttccaggtccgtggagtggctggaggcagggacggctaggtaagcgatgcgcacgtttttgatgtccatgctcatgccgtagccgaagaggagcaggagcacggccggaaggatgaccgcaatgcccacattgccggggtcccggaccacctggtggagttccttgacgatgagggctcctatccttttgagggaggcggtcatgtttctcctcctccttttttcatgtgttcttccgtgatggccaggaaggcgtcttccagagaagcgggggctccgtcttcacgcgggggagcgtgtttgcggatatcgtccggggaaccttccgccaacgtggttccatccatcatgatgagtatgttgtcgcagaattccgcttctcccaggaagtgcgtcgtgatgatgacggtgacgcctttttccgccagggcgttgatgcgcagccagaagtcgcgccgggccagggggtccgctccggaagtgggctcgtccagaaaaaggatgtccggggagtggagcagggcgcacgccatgctgaggcgctgcttatagccgccgggcaggtgcgcggcgggggcgttcatgtacggagtcaggtgaaattcttcttccatggagcggatggcttcctgccgctcctttccggacatgccgtaggccccggcgaagaattccaggttttgacgcgtggtcagcatgccgtacatggagaatttctgggccacgtatcccactttcctgcgcgccctggcggcggcggtccgcagatccgccccggccaccttgagcgtgccgccgctggcgggcagcagcccgcagagcatgcggaaggtggtgcttttccccgctccgttggggcccagaaggccgaagacctgccctttgcggacggagaagctgacgtggttgacggcaatgaaactgccgaatttcctgacgaggtccgttacccggatgacggtgccgccgttttccgtccgctccggttccggcgtttcggcaggggcggggatgtcctgcggggcgaggttcacttgtccggcaagcagggtcatgaagccgtcagagaagtccggctgcgcgggggcgggatggtattcctccagcttttttcgtgctgggtggccgtggggaacgatgatgcggacggtgttcccctgcggggtggcgttgatgatgccgggcacggcggccagcctgctctggaattggcgcgcatgcagcccctccggcgtgcgcaccgtcacgcacatgcctttcgcccgggcgatgacgtcggcgggaggggcgtccataagcaggcgcccttcatacatgatgagggttctgttgcagtaggccgattcatccatgtaggaggtgctgaccagcacccccacgccttcctctccggagaattgtttcaggatgctccacagttcccgtcgggagagcgggtccacgcccacggtaggttcatccagcaggatgaggggcggggaggagaccagggaacagcacaggcccagcttttgcttcatgccgccggagagctttcccgcaagccgcgtggtgaagcgttccaggctggtcatggcgagcaggctgcggaagcgcttttccctgtcctggccgtaaacgccgtgcatgcgggcgtaaagctccatgttttcccggacggtaaggtcttcataaagcccgaatttctgcggcatgtagcctatggaggcctggatggaccggctttttttcacggagtccagatttaggacggagatagacccgccatgcggtttcatcaatcccgtgatgaggcggatcagggtggtttttcccgctccgtccggccccagcagccctacgatttccccggcggacaggcggaaggagacgtcatccaccgccgcaaatgggacgccggcggagtccggaaatattttccggacgttccggcagtcaatcaggggctgggattccgtggtcatggcctgggctgttccgggggctgtgttccggcgttttggtccagggggatggtgacggtggcgggggctcccaggcgcagccggttgtccggatcgtccacaatgatgcgcacttcatagaccagtgccgttctgagatccggcgtttccacgtttttaggggtgaattccgctacggaggagataaaccccaccgtccctttgaagccggtgtccgggaagctgtcattgcgcacggtggcggaaaagccgggctttactttgccgagctgggattccgtgaggtaggcccgcacccatttggtatggttcagggagatgttgtaaacgggtttctgaggggaggccatgtcccccttttccagaatgcggttgcgtaccacgccgttgccgggggcgtagagcacggcgtctttcaggttctgctccctgatggtcaggctggctttggcctggttgtactgggccagcgcctgggcgacgtcttcctcacgggacccggccagcagcagttccagctgttttctggctacatccagattggcggcggccacttgccgggaggcgatggcgtcgtccgcctcctggcgggagatggattttgtttcagccagcgcctccagccttttgctgcgcattccggcgttgttcagcgtagcttccgcggcctgaacgtttgccctcgcctgggctatttcttccgcgcgcgggccgtttttaacgcgcaggtagttttggcgggcggcttccgctatctgccgggcttcgtccgcggcctgccggagccgcaccgtttccagcgtggcgagcttctggccgggaacaaccgtgtccccttcgtccaccagcacggagtcaatacgttcggagatgaggaaagccagatccacctggcgcaggtccacattgccgtaaagaacggctttgtcctcgggcccggacggagttttccggtagatgagccaggcggccgttcctgccgccgcaaggagaaccaggaggataaccagctttttcatagttttatttatacgtgtgtataatttattgcaagtaaaaatggagcccgcatgacggagaaggaattagcgatttactaacggagggagaacaggcataatccggcgtcttttacttttcccattatctgttatgatgaccgccaccgagatacgccaaagctttctggactttttccgcgaaaaacagcacacggtcgtgccttccgcttctttgatgccccagagccccggtttgttgtttacaaatgccggcatgaatcagtttgtcccgtatttcctgggcgtatggactcccccgtggacgcccgcccgcgctacggatacccagaagtgcatccgcgcaggcggcaagcacaatgacctggaggatgtggggtatgactcctaccaccacacgttttttgaaatgctggggaactggtccttcggggattatttcaagaaggaagctatccgctgggcctgggagctggtcgtggagcggtggggatttccggcggaacgcctgtacgccaccgtgtacgcgccggacaagagcaagggcgaccccggagagtttgaccgggaagcctgggatttctgggctgagctgttccgttcccgagggctggacccggacgtgcatatcgtgcacgggaatgtgaaggataatttctggatgatgggggaaaccggcccctgcggcccctgttccgagctgcacgtggacctgaccccggaggggaatacgaagggaagcctggtaaacaaggattccgaccagtgcatagagatatggaacctggtgtttatccaatacaatgcggagagcgacggctccatgcgcaatcttccggcatgtcatgtggataccgggatggggtttgagcgcgcgtgctccatcatgcagtgcacgaacggattcaaggatttttcccgcaaaccgtccaattacgccacggatgtattccgccccctgtttgaccgcctggaagttttgagcggacggaagtacgcggacgtgtatccggcgcccggttccaaaagggtggatgcggaggacgggacccttcaggaggcgattgccttccgcgtgattgccgatcatctgcgcacgctcagtttttccattgcggacggcattctgccgggcaacaatggccgtaattacgtgctgcgccgcattctgcgccgtgccgtgcgctatgggcgccgcctgggctttacccagccgtttttggcggaactggtggatacgctggtggagtccttcggacaggtgttcccggaactggccgcccgcgccgctaccgtgaaggaggttttgaaccgtgaagaggccagttttaatgagacgctggaccgcggcctggaattgtttgacgcggaaacggcttccgccggaaaggtgagcggcgagttcgccttcaagctgtatgatacgtacgggttccccattgacctgaccgccctgctggcggaggaacgcggcctggatattgatatggagcggttcaacaggctgatggaggaacagcgggaacgcgcccgggccgcccgcaagagcgaggtggtgcgcgccctggatttgaagacggacgccgtgacggaatttacgggatacgatgtggacgaatgcgccgctacggtgctggaagtgagccgccagggggattccctgttcatcatcacggacaagactccgttttacgcggaaatgggcgggcaggtatccgatgccggtttgattgaaatcggcggggaaagctaccatgtgatggccgtccagcagatagggaatgcccgagcccatgtggtggaggcccgtcccgggctggaggtgaggcccggcgaccgcgtgcatttgagcattgacgcggaacgccgccgccgcattgaggcgcatcacaccgccacgcatcttcttcactgcgccctgcatcaggtggtcagcccggatgcggcccagcaggggtcctttgtttcgggagatcggctgcgctttgactttaacagcagcgccgtttctccggatcagctccgcctgattgaagagaaagtgaacggctggattgaggagtctcttcccgtgcactgcacggaacgcgcctatgcggacgtgaagggcaatgccgcgattgcccagttcttcggcgacaagtacggggatgtggtgcgcgtggtccaggtgggcggatgcagggatgggctggacggggtttccatggaattctgcggcggaactcatattgccaatacgaagaatatcggcctgttcaagattaagagcgagggtgccatcgcttccggcgtgcgccgcattgaggcgatgactggggacgctgctctggaaatgatacggcagcatgttgttgccaagagcctggaaatcgccaaggcggtggagaagatcaaggaagtcaattacgagttggcggacatggggctggaacaggtgcctgtccccacgattgaaggcaagccggggctgacggccctgggggcttccgatatccggacggtaaatgattccctggcgcgtttcgacgcctccgtggagcatttcaaacagacggctctggatgcggagaagaagcttaaaaaagcccgcgccgggcagtccgccgccaaggcagacgccctgctgaatgagtggctttccgatgccccctcttccctgatccaggtggcggagggcgccggggaattgcttcaggagctgctgaacgggttgaaaaagcgccagtatgcgggcgccgccttcctgttgtgcgtggacagttcttccttgctcctgggcgcttattgtggcaaagatgccattgcggacggattgtccgccggagatatgatccgcgaggttgccgctcttgccggaggcaagggaggcggtcgtgcggaccaggcccgcggttccgctccgcaggatgccgatcctcaggccctggctgccgccgcccgcaatattattaacggataaaccccttacctgggccctatcggacaccaatcatggataagaagattttcccggacgaacctgagattcccattttgcctaatttgtttacggcagggaacctggtgtgcggttttttcgccattctgacgatttttgagggaatcaaccaggcggacagcgacgctgtggctgctttttcctattatcagaatgccacttttttaatcttcgcggcatgtttgtttgacttgtttgacggccgtattgcccgcatgcgcgggcaggacggcccgttcgggcgggaattcgattctctggcggatattgtctccttcggcattgccccggcgctgctggtagccaaggccgtcctgttccagctgtcccctccggaggtgggttggggcatcggcatcctgtatctgctgtgcgccgcgctgcgcctggcgcggtttaattgcatggcggccgctccccggaaggaaggccagagcagcgattttgtgggtctgcccgttccgatggcggcgggagccgtggtctccaccatgtacctggtgatgtatctggcgggcagggctccggacggggccatggacctgggcgtcttcaaatacgtgattgcgctggcaatggcgggagtctccattctgatgatgagccgggtggtctatcccagcttcaagcatatcaacatgcgcacgcgggggacgatgtacgcgattgtgttcatcgtgctggcggtcatctgcattttcaaattcccgtgggtgatgcccgcagtcattttttccatttatctgctttacgggctggtgcggccctgggtggcccgccgctggcggaacaggctggaagcccgcgatggagaataggaagacttttagaaaactgttcctgcctcttctttgaacagaccatgctgcgccggattgatgccgggcggcggtgtttccgcggcccggttccgggaatgtccctgggtccggcttttttaagggcgggaacgcagccctccctttcaggaccgtccgcaattttcctgcgcggagcgtgcgccggaacggccgggggataaagattcggcgtcccgaggaaagacggagaaggagggaaggggaggaatcgtcccgaaggaccggagcttatttgtttttctttttaaaatcgtccgcgaaggggtctttttccggggcggtgggcacggcgtgcgtttcaatgtccttggtactcttgaccagcgtgatgcatacgggcttgctgcggttgcccatggcgtcataagtgtaaaggaagcggcgcacgagttccttggtgcgggaatcgaacatttgctcttctctcaggttggcgttgccgtcgtagccgtaacgaacgaaaaagagttcgtttttctgcccgtcaaagatcaggcaggagcgcagctctccaaaaggccctcttttgtacagggttacggaaacgaggacattgcggatgttgtaagtggtttttttcatcccttttccgtcccctgttttttcaaagtagctgcgggaaccgtcttcatgtttgaccatgcgggaagaagcggtctggacattgaaatcgtcctggccggaggccagggctccggacgtcatgagcagggggatgaagagaagcaggggcgttgttttcatggtgaaaaaagagtttctgacttattaaagtgatgtatagtggctttgacaagaacgtaattagatgaactggcttgtaaggagagacgtattggatgtggcgcgcggaggcgtgctgatgggaattgtgaacgttactccggattccttttccgacggagggcgtttttatgcgacggaacgcgctgtctcccatgcaaaagagcttgaacggcagggagcccttattctggacatagggggggagtccaccaggccgggggccgcggaggtttccgcggaggaggagttggacagggtgctgcctgtggtgcgggaactccgttcatgcacggatgccgtgatttccgtggacacgcgccatgccgccgtagcggcggctgtgctggaagcgggtgcggacgttattaatgatatttccggattgcgggaggcggggatggcggaattgtgcgctgcggcgcgctgcggcgtggtggcgatgcacatgcagggacggcctgaaaccatgcaggacgctccttcttatggggatgtggtgcgggaagtgcgcggctattttgaggaacgttatgattttctgctggggcgggggctggaaccggagcagatctgctgggatcccggcatcggctttggcaaaacggcggaacacaatctggccctgctgtccaacatggacaagcttcaggtggcaggccgcccggtgctgctgggcctttcccgcaagcgcatgctgggcgccgtcctgggggatgcggagcagggacgcgcgccgctgagcaccgccgtgatgacggtgtgggggcatttgcacggcgcgcagattcaccgtgtccatgacgtggcggaatgcgcccgcgccctccggctgatccgggccgctgaaccgtttgtccgctgattgagccatggaatccgcttcttcccgtccggtattgacgtccctggcgtccattgcattttccctggcggtggtgttcctttttctggcggtacgggggatctggcctttcggaggccgcttcctggagtatatggataacgggcagctggtttatcctaccttgaagtattatgcctccgccctgatgtccggagcgtttgacggagcttttttttatgatgtcaatggcggcgcgggaatccgggtgagccctacgctgccgcatcagctgctgatcccctccacctggattgccgtggcgatgggggattccttcctgttgaaggacatggtctgggtgatgctggcggatgtggcttgcatctgcgtgacggcttcctggttcctgagacgcgtgtttccctccctgcccgtatgctggaccgtgctgctgacggcgggttatgccgtggggggctttttccagaccaagtacgggttcatgcagttcctggaccatgccgccatgttccccctgtttgccctgggcctttaccggctggtgaacgggggaaggggctggctgtatgccgtcggcctcttcctgctggctacttccctgtacagcgctttcatggccgtcgtcaccggctggctgttcgcgtgggcctttacgctgcccctgaaggggacgtgggaacgccgcgtgcgcctggcccgcgtgttctggtacacggcggcggtaacgctggccacttgttattactggctgccgatggcggaaatgagccgggattccatgcgttccctgtttatgacgccgcccacgttttttgaattgtcatggccgtttgaccctcccaaattcctggaacgcctttacgcctgcctgccggggatgtcatttgccgctctggcggcggtttatttggcttgcgggaagcaggcgtccccggcgccggacagagggaggcgtttgtttatccttcttctgacggcgtccgttttgcccgcgtttgtcgagcccatccaccgcgccgcccatttatggagctacgtggattttcccgtccggttcggttttattcccaatctggcggtaatgtcgttctgcgcctggattttgtccggcggcaggctgccggggccggcaggacggccatggggatggggatggtgcctggggcttcccatagcggctttttccgtttccctgtttgtcctgaagatgacggctgcggatcttgcggtgcgtcttctgcctttgctgttttttgcatgcgcatgtttgtgttggaggcatgtggagggcaaaaggctggcgtggtccatcgcttccgtgatgatgctggggctgcccataggggctgccgcgttctggaagcagggggaggaggagaaagcctccgtccaggcgctcaatgcggaatggctggcgcgcggcatgaaggggtattcaggcttgctgcgcgtgaaggacagggatcgcctgatggtggaaaacgcggattgcctggggcctgtcccgggtattggcaatttccggcatacgacgagcatcaggcatttccgttttctgaaaaacctggggtaccgggatgaattcacgcgcacatacggccagggaggcactctgttttccgatttgctgctgggccatggttttgtgctggcgtcccgacccatggagggaatggagtgcgtgcttttccgggaaggcatgtatttatacaggcttccgggcgcccgctgggggctggtggtttcccagggcgcgctggggttgcgtctggatgaaaacgctgatgtgttcagcaatcttaatgccctgcatgccgcgctctgcccatcagcggaaggccccctttacgtacccgtaacaatgaggacggagatgagcggccccttttaccgggcgggcattccggaatatcccggcgcggtgtacgggtttccgcagacggatacggcggaactccgcgtcaatggctgtgcggtgtccgttatggcggaggcgcagaagacatccggaggaacgagccgcacctataacggggtattggagttgaagcgtgcggccgttgccggggaaaccgtggtggagggaagaatgctgcgggttgtggaggctcctcttctggcggctgcggcgcgtacgccggagcaggatgttccggttctggggaaagagcaggataagtacgggctggaggcgaaaggaagaggtggccatgtggaggtggagctgactgccggagaaggggaggctctcatggtgccggtcgtgtatgaccggggatggagggcccggcggaacgggatggaggcgcctgtggaaaaggtgggggaattgatggcggtgcgccttctggaaggacaaaaccgagtggtgtttgattattatccgcctctgttgaaaagttccctgctggtttcctccggagcggccgtcatcttcctgctgtatgcatggtgggcgcggcggcatccggaatcctcgctcaggaggattgttctggcctgcggatacaggctgtttcagtgctgcgccgccgtggtgctggcggctgtttatatggggtcaatcgtgttgtttatcatgcagtccgcgttgtgaaggaatccccggaaggcagggaaataggccagggactgagtgcggggggatgctggcgtggaacaatatccgcggggcgtagccgtttcctttttgccggtggccggattggcgggaaaaggctttccgttttgaaggatggttgacaggggaatctggcgcggtagagtggtttcatgcagtcttcctattgtccgagtccttatcgatatacgcgccgcgtaacccgtgaagtcatggtggggaatgtgggggtgggcggttccaatcccatccggatccagtccatgctgacgtccgatacgcgggatacggatgcctgcgtgaaggaggctttggagctggcggaggcagggtgcgagattatccgcctgaccgcccagaccaaggcgtatgccgccaatttggagaatattgcccgggaattgcgcgctgccggctgccatgtgcctctggtggccgatatccacttcaagccggatgccgcgatggaggctgccaaatgggtggagaagattcgtattaatccgggcaatttcgttgataagaagaagtttgaagtgcgggagtattctgacgccgaataccgcgaggagctggaccgcctgagggaagaatttacgcccctggttctgttttgccgagagcatggccgcgcgatgcgcatcggttccaaccatggctccctgtccgaccgcattctgaaccgctttggcgatacgccggaggggatggtggagagcgcgattgagtttgcccagattgcccgcgacctggattaccattccctggtgttttccatgaaggcttccaacgtcaaggtgatggtggccgcttaccgattgctggtggagcgcatgaacgccctggggccggattggaattatcccattcatctgggggtgacggaagccgggggcggagaggacggccgcatcaagagcgccgtgggcatcggctccctgctgacggacggcattggtgataccctgcgcgtttccctgacggaggacgctgtgagggaggtgcccgtggcttaccgcctgtccaatcctttccagccgtcggagcgttccgatgacccggtttccttccctgaaccggagttgagctatgatcccctgaagttttccaaaaggcagggtgggctggcgatgtgttatggcgtgcgcctgggctgggaacagcctgtgcgcgtggcggttcctgatgccgggttttacgccctgcagacggaacgggaggcgatgggggacatgatgcctgaattatccctggggcagctggatgccattgaggtggatccccggtgcgatgccgatctggagccgttgaaggagctggcggaaccgtctattgtcactgtgaagaacgggctggctatggagcctgtatatgcgttccgccttctggctgcccgtattgaggacaggcacctgatcctgctgaaggatacgctggtgcccggttccgtttccggggaagacgtgccgctgacggctgcccgcaatatcggctccctgctgtgcgacgggattggagacgccgtgctgattcagggcgagtcggacccccgtttggcttctttcctgggattcaatattttgcaggctacgggaacgaggctgacgcgggcggattacgtttcctgcccgtcctgcgggcgtaccctgtacaatatccaggaggcgacggcccgcatccggaaagccacggaacatctgaaaggggtgaagattgccgtgatgggatgtattgtgaatggccccggcgagatgtcggatgcggatttcggttatgtgggcggcgcgccgaacaagatcaacctgtatgtgaagcacacgcctgtgaagttcaatattccccaggaggaggctgtggaacggctggtggatctgatcaaggagtatgggcggtgggtggaccccaagtgaggttttaacgttgagggaacttttttgatgcggagagtgttcatcagcggcggtcacggcggtttggcgcgggccatcgtggaatgtttttccgctgcgggatgggagacggatgcccccagccatgccgcactggatgtgggagaccgttccgccgtacgccgctggtttgattgccatgccgcgtatgatttggcggtttgcgccgccggaattactagggacaggccgttcctgaagcagacggaggaggagtgggacgaggtaatgaatgtgaatgtgacgggagccgcctggtgcggccgatgcgccgccgccgccatggtgcgggagaagagggagggtcaggtggtgatgatcggttcttatgcggcgctccgtccggctccgtcccaggcggcttatgccgcttccaaagctgctctggcgggcctggtgaaaagcctggcgcgggaatggggaaaggatgggattcgcgtgaatctggtgttgccggggttcatgctgacggagatgacggccgtgctgcgggatagcgtgaaagaggcggctttgtcccggcatgttttgaaccggttgaatacgccggaacaggctgcggcgtttatcctgtttttacaggatgttcttacggcggcttccggccaggtgttcgatctggacagcaggattgtttaataatggacagcggatttattatccgcgttctcccctgctgatgatatatttccaagaaaatcatttttttaataaaaaagatagcctgctatgattttgaaaacaggaaatcttgaaaaacaaggtttttccggtcttttggaaagtgtgtaaacatggatagattcctctttccgtgtttggatttccatgttttcaacgggaaccggatgtccctggtgtatcaaattttttcttaaattattcttcttcaatattaaggcttgaacgcggataataaatccgtagaaatgtttctccatgagtttgccgctggctgatgatgaagagaaaggaaagcgtttttcctgtggttgtccggaatatatttccccgtcccggaattatggaatagatgccttgcgcattgtcgccatgatgatggttttaattcttcatcttttggcctccattgatgttttgtctttggagaaccatgggtccgcttcctataatgtcgggtggctgctggagattgccgcttattgcggtgtgaattgttatgcgttaattacaggatatgtgtgctgcgacggaacgttcaggtatgaacgtgtggtttccttatggtttcaggttgttttttatacatggggcagtttgctgctggctctgttgtttttcccccaggaggttcagttgagcaatattctgcattccctttttcccgttttatccggccagtattggtatgtaacggcgtatgtggggctgtttttcttcattccgtttcttaacgccctggggaacaggctgaccaaattacagttccagtatcttctggttaccgttttcgtgctgttttccgttattcccaccctgcttcacacggatgtgttcccggtggaagaagggtatagcatctggtggctgggcatcctttacatgctggggatgtatgttaaaaagcatggcttgctgacggaaatgaaaacgcgtccgttatggatgttttatgccggattcgtatgttttgcctgggttttcaagatggttcttaacgtggtgtctccatacctgattgggcagatcaagggcggtggaatgtttattcgctataattctccttttattgtagggacggcggttgccctgttgctgattttttcccggatgcatttttcatcccgaagggctgtctcctgtatttcatggctggcggcagcgtcgttcagcgtttatgtgctgcattgtaatgctttgataggaaaatggtttttgtgggatgtctttgagtgggcagcgtcttcttcctcagccctgatggttgtgaacgtgttggcaatagccgccgtggtttatgccggatgcgccttggtggactccgtgcggcgttatttatttaagctcatgaacgtggaaaggggcgcccgggcggtgacgggcttttgcggaaagctggggcatgcattccggaagatgtgccgccggatagattcgcatccctaaggatgagggaatgtcctgttccggcggttccgggcggtttttgtctggagctaggctagtttttattatcgcttttatccaggagggttttaagccagggaatgaccaggtcttttttgaagaaatggttgcgcgggtccacattggcgaaacggaaaaaggcgtccctgtccagacctgcgggcaattggctgccgtgccagcgttgggcagggtccgcaaaccggggctggtgatggtactggaaatgatccggcgccccggccatacggtaggctgcggagatgagctggaagtccctgtccaggccgccttccgtgcaaatgacagggcgcggagcgagagccgccacgatgtccgggaagtcgaattgtttccagaagcccggaatgaggtggcggatggagttgggagcggaacgcacgcccctgccgttgggcatggtcatggttttggcgcgttccagcgtgcggcacagaaagtcgttatacacgaaggcaaagatatccgggttcaggctgcccagaaccatcatgggttccgttcccagggagaagccgctgaggataatatggtttttttgcgcccaggggcgtgttttcacccaatccagaatacattggtccgcgtaggaggtgtagcccagccagctccagtccatttccagcaggaagcgggccaggttttcataatcgtgtgaagaacggcctgcggcgcgttccgcgtctccttcttcacccgttccggcattgtctaccacaatggccgcccatccctgcctgacataatggaaagccatggcgttgttgcccggctgctgtacggaaggctggtccagatccggtgatgtttcccccgccagctcttccttggtctggtctgacccgggaatgcagaatagcacgggaaccggatttttgtctgaagcgttgttcggcaggagcaccaggaacggtacggcggctcccgggaagggataggcttcccatttttccacccggtagtgttctcttggcacggtttttaccagaacgggggcggggatatccgcctggggggggaatttcatcagttgttgcatggctttccggactttttcccgccaggcggggaaatccttcggagccatatccggggaaaattcgcatgccggacgcagtttttccagcatggtctggacgatgccccgggaggaaacatgccgctggtcgctccgggatgaatgaagcaccgcccagtctgccgcccggaatttttcactgggcggggtaagggagaaggagggaagagaaagggatgccaatagaagagagaaaaaaacggcgggctgaatagtcatgaagccagattgccataaaagaagcttccattgcaaggttgcagcggtggtcttttcaggttgttcctgacgcatcggaagcttgagtttttccgggcagggcggtagtctggccgccgtcatgatggcggggggtaagagtcttggaagcccggaaccgcgggtatgcggcctgggcctggcttccggcttcggcatgggggcggcagtccatcttgccggggtaagggaagggcgcagagtgttgaagccgttgagcgaattgtggggcgaaggtaatccctggggcgatgtattgagcggatggattccagacagggaattgttatgcagccgcaggaacggccctgcttcccagctggcgctgctgttggcgcgccaggccgtggaggacgccggatggggaaggaaggaattgagggatgccgccctgattgtgggcagttcccgcgggaatgcttccggatggctgagcccgtggccgggacggcggcccatgaaaattttggccgttcccaattccctgcatagcgaacttgcttcctgcgtcagcatcgaattgggaatttgcgggccttatcacgtgctggcgagcggctgtgccgccggcctggatgccgtaggcatggccgccatgctgatgcggcagggagttgttaagagagcgctggctatcggtctggatttgcctttgtgccgggagctgctggggacgtactgggcctccggcatgctttcccgcaatggtttgaatgatccctacggccctctggccgacggcatgtgcatttccgagggaggggcggccatagccctggaattgtcttctgctccaggtatttatgtgaaggattatctggtgaattccgatgcctatagcccgctgggcatgccggaggacggaaagagcatagccgccctgctggaggctgctttgaaaagtcgggatggagcggttcctctgaccgtttgtccccatgccagcggcacggcggggaatagcgtgtccgaacgggctgctttgaaaagggtttttaaagacggactgccggatttgaggatgatgaagccgtggacggggcatgccattggaggcagcggaattttggaactggccctgatgctggtctttgccagggagggggtattgcctcccaatcctccctgggccaccttcccggaaggcggcgcctgttctgcggaggagctgccgttggccggggggcggatgctggtcaaatccgccgcttccatgggcggccataatgtggtgctgagtctggctgtggacggttgaatattgttgaatagtgaacgcttatgaagaatcctgaacagtttttgtcagagttgaagtctgcggggctgctgcgcgtcctgcgggatgtggaatgcctgcccggaggaatggcccgtctggcggatggccggaaagtggtcaatctggcaagcaacgattatctggggctggcccaccatccgtccctggcggaggctttttcccgtgcggtgcgggatgaaggggccggagccatggcatcccgcctggtgacggggacgcggcgggaacattcctgtctggaagaggccctggccgctttgaaggggactgaagcggcggtcagtttttcctccggttatgctacctccctgggagtgattgcttctattgcggaccgggaggatacggtgctgatggataagttgtcccatgccagcctgattgacggggcgcgtttgtccggggcgcgtttgtctacgtttctgcataacgatatggagtcattaagaaaaaaactgcagcatttgcggaacgcgaatccttccggcgggattctggtagtgaccgaatccgttttcagcatggatggagaccgtgccccccttcgggaaattgtgcgtctgaaggatgaattcggcgcgttgctgctggtggatgaagctcacggattcggcgtgctgggagaacacggggccggactggcggaagaactgggcgtttcctcccggatagattttcaaatggggactttgagcaaggctgccggggtaagtggtggatatgtggcctgttcccgcgcctgggcggatgtcatggttaattccgcccggtccctgatttattccacggctcctcctcccgctttggccgctgccgccctggccgcggtggaagtgatccgcagcggggagggaaaggaattgcgccgccgtgtttccgtgctggcaaatagtttgtccgccgcactggggatgccgggaaggcctgtttcttccatcttccctgttgtggtgggagagaacgatgctgccctggctgcggcggatgccctgctggaacagggctttctggctcctgccatccgttatcctacggtcccccgcggaacggcccggttgcgcattacggtaacggctgcgcatgaatccggacaggtcacgcggctgggaacggcgttgaaggagctgctgcatgggaaataacgcaggagttgtttttggttctccgcattagagccggttcctgtttttatgcggggtctgccggaaatggggttatcctcattgatgctgccataaaaggggaagaaggatatctgatgcctggcggaacggaatgacatccggatgtcctgaatggcagagcttgcatcttgacaggaaagttttcttccagtaaggggaaagaatgaaggttcccaaaggaattttcactgaaccctataaaataacgttatgatgaatacttctgattcttcttctccttcgtcctgctgcagcggttctccttcctgcacggccgctcttgttctcggcattatcgccctggtattggcattgatcggttttttcccgtgcctgggctggattactctgattcctgcggggctgcttgccattattgctctgatcatgagcattgtggctgtcagtaaaggttcacccaaaggggctcttgttgttgccattatcgcgttggtcctgtccgccgttgcgggaattgtccaggcatggatggccagcgctaccgtgacttacatggaacagcaccaggattatgtggaaaagaaggctctggaaattcaaaaggagcttcggcagatggagctggaaaacagggagccattgaggcagtccggggaggcggatggaatgtcccccacggatggaacaggctcccaggatttgtagttcctgaacctttttaggaagatcggcgatgaatggcgggcgctcttcatggcgttcatgccgtgatagctgggtggtcaggaaagtatggctgcctgtatgggctgttctgtcctgcctgttgctggcgccctccctcatggcgctggcaattagccctgacaggatgaattctctggcggcttctgttgccgtgccgcatcgtgaatgcccgttgtgcggcatgacgcgagggtatgcggaaatggcccgcggggatatacgagctgcctgggaatggaaccgcggcgctccggtcttgtttatggcaggactgctcaatggaggggctgccgcggtttatttggtatggtgctggcggagaagggcgggaagccgggaaaaggaaaacagttctctcgcgtagcatgccgcaaggggaggaaccggctccccttgtccctggtaaatgacacagcggaagttttgaagcggggcctgggaagtttttctgcctcctgtttattccctgtaacggggctggcgcttggtggtggggggacggaatgatgttgagtttttattgaatgaattccatgccaaattcctcgtagtgccgaagatgaagttccactgcccaggttgagcgttttgccggagggagctgcgttgttcctgaaaaggagaggggaatgcggcgccggtgtttcatgccttaggattattttttgtcagaaaggggaatagcttttctgggaacggccggtattgccgttcatggaaggagtatcctgggtgtgaaatattttgatttttctttatttaggtattttgttgatgatgttgttttatattaagttgtgtaattttctaacatttttattctaggcccgtttgattttatatatatagtttttggatattgtatgaatatttgcatgtccatctatagatcaatcgaattgcggaagaatacatccggaagttataaggtccggctgactatcgaccggggaagcaagttctgcggcgccagaaaatctcttggtctcggcacccatcgggaggattgcgccttaagacgtgcctatctgatgcgatgcctgctgtttcatatgggatggtttcccggcggaaagattgccgtcaggaattcagccgaatgcggtatcaaggatgtggtttgggacagcatggagtgttcggaggactccggaatgttcaagcttgccggaaggggctgccgcatggctgcggatgaaaccatggctatctggtttcagacgaatggagatgggagggttcaatgccttcgtttgctcatttccgggtggaggaaagatgaccgggcaggtgatttgagggtgttgattcaggggatgcggcattgcgcctcggaacagcgccagcatccctgccggattttgaatattgaaatcggtgccggctctttcacggcgccccgggatgaatgtgtgctgaaagggtaggaaaacggattgtttcagataccggtttattctggttttattcggaggccgccacattccggttgggaaattgggccgaatatccggcatgcccggtccggagtttatttggccgttatggacgacgggaaggttgccgtatcccgggcgagttgaaggcgcgggaagaaggccgggaggaatggtgtgctgcctgctgggaaagggagccctgttttttctgcatgaaaaaaccccggatggaatgattgccatccggggttttgtttgaagattccggctattttttagcgggcagtttcacctgaatgtgaatgtcgcgcagttgccggtcttccgcggcggcgggggagtcgctcatcagatccgctccccggttgtttttcgggaatgcgatgacttcgcgaatggattccgcgttgcaaatcatcatgaccaggcggtccagtcccagcgcaaggccgccgtggggcggagcgccgaagctgaaagcgtccagaatgtggccgaattgttcgcgggcctgttcttccgtgatgccgagcgctttgaacatggcggactgcaggtcgcgttcatggatgcggatggagccgcctcccagctccgtgccgttgagcaccacgtcgtaggcctgcgcgcgaaggtctgcggagagttccccgctgagcagtttttgttcgtcttccttgacggggcgggtaaaggggtggtggatggcgacccagcgctgctcttcctcatcccagcctaccagcgggaattcaataacccacagaaagtcgcgttccttgttgtccttgagcagttccatgaattcggcgcattgcaggcgcacgcggcccaggatatcgcaggagggttcccacgggccggcggcaaagagaacgaggtctcctgtttcgatgtccagggcttccgtgagtttttgcttttcttcgtcggaaaggaatttggagatggggcttctccagtcttcctcgcgcaccttgatgtaggccaggcctttggctccggcttccacggcagttttcgtcagggcgtcaatctggccaacggaggcggaaccgaatcccttggcgttgatggccttgaccacgccgccgttgcttacggctgaggcgaataccttgaagccgctgttttcaaagatggaggagacgtccgtcagcttcatgccgaagcggcgttccggcttgtcggaaccgtactgatccattgcttccttccaggtcatgcgggggaagggggtgggaatgtccacgcccagggattccttgtacacgcgtttgagcaggccttccaccaggttgtagatgtcttccggcgtgatgaaggaagcttcaatgtccacctgggtgaattccggttggcggtccgcgcgcaggtcttcgtcacggaagcagcgggcaatttggaaatagcgttccatgccagccaccatgagcagctgcttgtattgctgcggggcctggggcagcgcgtagaatttgccgggcgccaggcgggagggcaccaggaagtcccgtgcgccttccggcgtggatttggagaggatgggcgtttcaatttccagaaagccgtgctcgtccagatagtcgcgcgtggctttggtgacgcggtggcggatctgcatgttgcgggccatggccgggcggcgcaggtccagaaagcggtatttgaggcgcaggtcttcgttggagagggcccgatccagctggaaggggagcacgtcagccttgttgatgacgttcagggtgtctgcggagacttcgatttccccggtggggaggtccgcattggtcgtgtccaccgtatccgttttcaggcgggcggccacggtgccggaaatctggatcatgtcttcggagcggagctgctgggaggctttcgccacatcctgattgacttccgggtgaaagactacctgcgtgatgccggagcggtcgcgcaagtcgataaatatgacgccgccatggtcccggacggaatctacccagccgatgagggtggtcggcttgccgatgttcgcagcgcgcaattcgctgcaggtatgagtgcggtatgagttcatctttattgaaaatggaagaagggggaaagaacggtgtcaattgcttccggtgagtgaagccacggcgtcaaacaggtcgtccatggcgacgggggatgaggtgcgcgcgcccaggtcgcgaagttccatgaccgggaattcatctcccacgatcaaggccgcgtgggcgccggatttaacggccttctgaagctgtccgttgactttggtgagcgtgaggggaaggtccacactgtatccctggtcccggagggcggaggcgatggcaagaacttccgcgcggcggctttcagacgcctgaaccatgaagatgtcgcagcctgcagaggccagcgccgcatctttcagcgccctggcatggggcgtctgttcaataaggtgggtgatgacggcatcccccatggcaaagccggttgccggcatgtccactgcgttgttggaaagggcgcctaccagcgtgtcgtaacgtcctccgccggctacggcgcgcaggctgcgctgtgtgtcaaagatttcaaaaaccagaccggtgtagtaggccagtccgcgcactacggataagtccagcttgacatagccgtccagcccgcgggccgtcaggtctttcatcaggatgtcatagcgttcggacgctctggcgggcgggttttcaataaaggccaccagatcgccgcggctgatatgaaaggcgtccagcttgcgctggcattcttccgggcggtcacgttcaaatttgtccacgatgccgaggaaagcgggaatatcctgttcctgcacgccgtgttccgaagcaaacctgatccaggcttcccggtcagagacgcgcacgatgaagtcgttttgcgtaaagcccagttccctcatgcagtcgatggccagggctatcagttcggaatccgcccacgcggaggcttctcccagaatgtccgcattgaattgataaaattcgcgcagacgccctttctggggtttttcataacggaagcatgaaccgatttcaaaccacttgagcggtttggtgtattcgcgctggtaggcggctgcgatgcgtcccagggaggcggtgagttccgggcggatggtgatgtcccggtccccctggtccgtgaagcggaagagctgggtgggtagctcgcctccgctctttttaagataaagctccgtggcttccacagtcgggccctcccattccaggaatccgtaacgatgcgccaccttcttccatgcgttgaaaagatagttgcgcacggcgcagtccgccggtgcaaaatcgcggaatccgggaagtggttgaaagcgagcgtctggcataacctggaaaaaaggatgttgtctgaggacgaaacagtttacagaattcctatgccttggcaagtccacatgcttatgatgaaggaatttcggtggaaaccatatgaatgactctatgcaggaggatggggacggttattccggttttacatgaaatgaggaagggcgggaaaggattgattattggggactttattgttttttttaattatccggattttttgcgcgggctgtggggcatgcgggtttaagtggccggggatttgtaaacggatgtcaaacaacaatattgaacagcaaggggaaatgataagaaggtgttcccaaaagtttttctgcgtatggagcattgcatctttccctttatagaaaaatgttttcctcccgcgctaaaaagaaaaccggggcagttttgtttgatttcataggagtatgacgtgaaacgaatgagttttttttctctttgggaatctaatatcagtattgattatgtgtaaagaatgtggatgcgggggggagctctcccatgaaagtcacggccacggcatggatgtccatgttccggtgttggatgccaatgaccggctggcagagcgcaacagaggtttttttgctgcaaaaaaccttttggttatcaatgttttttcttctccggggtcaggaaagacttctctgttgcagaagacggcggagatgctccgcggccgtgtgcgcatgggggttatcgtaggggatttggcgacggataatgatgcggaacgcctgagccgagcggatattcccgtggtgcagattacaacgggcaccatgtgccatctggacgcccgcatgattgcggaggccatgaagaaaatgcctctggacgatctcgacgttttgattattgagaatgtgggcaatctggtttgcccggcttcctatgacctgggggaaggcgtgcgcgtggtgctgctttccgtgacggagggtgaggacaagccgttgaaatatcctcccatgttccattctgcggatgttgccctggtgaccaagtccgatctggcggatgccgtggattttaaccgtgacgccgccctggctgcactgaacaaggtggctcatcatgcgcatgtgattgaggtttcttccaagaccggcgaaggaatggaggcctggtgcgaggagattgtggaacgtgcgcgccgcgcccgggaaggcacgattcagcatcatggccatcaccaccattgaacaggccgccgcggcattgaaatttgagatagccggcatggttcagggggtcggcttccgtccccatgtgtaccgtttggcggtacggcacggattgaaggggtttgtgcgcaatacggagtccggcgtggagattcatgtggaaggggagcccggcgctccggagcgtttctggaccgcgctgatggacggcctgccggagcatgcccgggtttatggagtggagcggaccgtatgcgagcctgccggttttgaggaattccgcattgaggaaagcgattccacccccggaggcgttccggtgatgctgccggatctggctccgtgcccggagtgcctggaagaaatgcacaacccttcttcccgccggtatcattatccgtttaccaactgcacgcactgcggtccccgctattctattattgagacaatgccgtatgaccgagcgggcaccagcatgaaggggttccgaatgtgtccggagtgccggagggaataccaggatgtggaggacaggcgttttcacgcacagcctatcggctgcccgtcctgcggcccttccgtgaaggtgctgttttcagatggttcaggactggggttcggccatgggtttgatacccccgcggcacaggcggcatgggtgctggcggacggtttgatcgtggccctgctgggcgtaggaggttttcaattgctggcggatgcttcttcggaagctgccgtcaggcgtctccggcggttgaaggagcgtgacgccaagccttttgccgtgatggtgccggatgtggctgcggcggagaggctgtgccgcctgtcggaggaggaaaggcgcctgctggcttctccggccgcccccattgtgctggcccgggggaggaaggatgtggatctggctccttccgtgtgcatgttcagccgttttgtggggataatgcttccgtcttcccctcttcatgcgctgctgatggatgtgtggggaaggcctctggtggtgaccagcgggaacctgagcggcgagcccctgtgcatctccgtggaggaggggctggagaaactgggccatgtggcggatgtgtttttggtgcatgaccgtccggtagtgcggcccgtggacgattccgtggtccgcgttacggacggcagggccatgatggttcgccgcgctcgcggatatgccccgcggcctgtgtggcgcacatctgcggcggctcccgacgtgctcgccctgggggccggactgaagaataccatctgctggctgaaaaggggcgtggctgtcatgagccagcatctcggtgacctgagcagtgcggcttctctgaacgcttttgagcggacggtggaggcgctgggcagaaccctggatgccgttccgcaggtaattgccgtggacgcccatccggacggccccacttttgcccttggccggcgtctggcgcggaagtggaatgcaacggttgtccctgtgcagcatcatcaggctcatgtgctggcctgcgccgtggaaaatgaaacgccgtttcccgctttgggcatagcttgggacgggacggggttcggtacggacggaacggtatggggaggggaattttttgtgttggaggaagagggtgagccgcgcagggtggcccgcctcaggccgtttcttcttcccggtggggacgaagcggttcgggaaccttcccggtgcgcctgttccctggcccgtcagatggggccgtggcgtacggacgggcttgataagcgtctggagagggggatgcctgtgcggaaacgcgaggttctggaggcgatgatggcccggaatatccattgtccgtcctcctcgtccatggggcggttgtttgatgccgtggctttctggtgcggttttgacggtgcggcggggtgtgagggccatgccgccatgatgctggaatcatgggccgcggaagcttccggggaaaaaatgccgggggacgcgtatgaatgggtcatgcatgaagaagagggattgctggaactggattggcggccgctgatgaagtctgtggatgaagatttgttggaaggcgtttcccgcggctgcatcgcccgcaagtttcatgagagcctggtgaatctggtctttgacgtggcggagcgtttctgcctggataggctggtgctgggcggcggatgttttcagaatgcctttttgcttgaaggactggcgggaatggcccagtctagaaggtgccagttggctctgccccagcgggtgccgtgcaatgacgggggaatttccttggggcaggttgcggcggtcgtacgccaatggaaaggatagaatatgtgtttggccgttcccggaaagattgtgagcgtcaatgagacggaccctttgttcagattgggggtggtggactttggcggcgtgacccgtgaagtgaacctggcctgtgtgccggaagctgtgccgggggattacgtcatcgttcacgtaggcatggctctgagtgtgctggatgaggaaaccgctcttcaaacccgcagggaaatgagagaaattgtggaaaatacggatccgctgtagggaggggcgttttccgaattcaattaatgatttatgcaggatgaggtccggcagctgattgaagaattgcgccacgctgtgacgcgtccgtgggcggtcatggaggtgtgcggaggccagacgcatgcgattgcctctctggggctggaagagctgctgcctcccggcctgcgcctgattcacggtcccggctgcccggtctgcgtgacggcggtggagttgattgaccaggccgtggaattgagcctgcggcccggcgtggttttgtgcagctacggggatatgatgcgggtgccgggttcccgcggggatttgttttccgccaaggccggtgggggaaacgtgcttctggtatattctccgctggaagcggtcgcttatgccggaagccatccggatacggaagtggtgtttttcgccgtaggttttgagacgacggccccggctacggctcttgccctgcagcaggcccgcgcactggggtatgccaatttttccgttctttgcgcccatgtgctggttcccccggctctggaatggctgatggagcaggatgagggaaggccggacgctttcttggctcccggccatgtctgcgccgtcacgggggaaatggattacgggcgtttggccgcccgttaccggacgcccatggtggtgacggggtttgaggctccggacctgctccgcggcattctgatgtgcgtccgccagctggaagccggggaatatgcagtgcggaatgcgtacggacgttatgtgaagcccggtgggaacagggcggcgcaggaaagaatgaatgaagtttttgagccggaagaccgccattggcgcggtctggggctgattcccggcggcggcatgaggctgcgccgtgagtggaatgacatggatgccgttctgcgttttgaatgcggaacggggaggcagggagcagatgaagcttccggatgcctggccgggcaggtgctgagggggctgattcgtcctggagagtgcccttttttcggatcgtcctgtacgccgctggccccgctgggggctcccatggtgtccggggaaggggcttgcgccgcttattatcattataaaagaagttgatgccatgtttgagtgtcctgttccggagcctgtttccgaccgtatccagatggctcatggcggcggaggccgtttgatgaatgagctgatccgttccgtgtttctgagcgccttcgggtgcccttccggaggcgtgcagaatgacgccgccgtattggagattcctccggggaggctggcgatgacgacggacagctttgtggtgcagcctttggagtttcccggcggttccatcggttcactggcggtgcacggaacggtgaatgatctcgccatgagcggcgcggagccgttgtatttgacggcgggctttattctggaagaagggcttccgctggaggtgctgacccgcgtggcgcaggatatggctgccgcggcccgtgcggcgggcgtccgtattgtgacgggggacacaaaagtggtggagcgcggaaagggggacggtatttacattaatactgccggggttggcatcgtgcgccatgggttggagatcagcccttcttccgttcgtccgggggattccgtgctgctcagcggggatttggggaggcacggcatgacgattatgagcctgcgcaccgggttgtctttcggagacggcctggaaagtgattccgctccgttgcatgaatccgtggccgccgtcattcgtgccggcattcccgtgcattgcctgcgtgacgtgacccgcggcgggttgaccgccactcttgcggagattgcggaatctgccggcctgacagtgaagctgaatgaaatgtccattcccgtgcgtgaggatgtcagggcggcgtgcgggctgttggggctggaccctcttcaagtggcctgtgagggacgttatctggctgttctcccacgggagcatgaggaagaggccctgaacctgatgcgcggctgcggcgtatctgccggagcctgcgtcataggccgggtggaggaattggggacggcgcccctgctgatgacgggacttcttggagtggagcgggtgttgacgatgccttcaggaatgcagcttccccgcatctgctgattcctggtgctgcatgattggcgttttgtggcagggaagcggtggaacccgcttccctgccggtccggtgtttcataggggttgccggagcggctctgtgcgcttccgggggaaagcgcagccggcttggtatggggaactggttgttgggagatggttcaggagggagtgtctttacctgtcccggcatcgggcaacgcttttaatgccgctttggcctgtgcatggtcctgggaggctgccttttccagccattcccgggcagtttccaggtttttttccacgccgaatccgtacaggcagatgattcccatattgtattgctcggaggcgtagccggctctggcggcgcgaagattcctgttttgccattccctggcttccgcttccgtgaagtcctggctcttgcagaattggtcccacgtttttccgaatttcatggcagccctcgcaaatcccgacagggcggattttctggtgtattcatccgccaggcgcatgtttttttccacgccgtcgggtcccagcctgtacaggtgggccagtccccagtatccgttggggctgcccagatccgccgctttttggaagagctgcagcgcgtccgggtattttttatgggacatggcgaataccgcattggccaggaagcgttccgctttgatgaattcgtaaaattcgggaatagcagcccattcggatttaagtttgttcctgtctttcctggatttgggaggcatgccggaaggcggggatattcggaaaacgggaatgtagccggaagcgcccatattggccagcccggccatcagaaagcagcccggctggaggcgccacgtgtgcatgtacaaaacgcgctctgctggcagagattccttctcgatccagtccggcaggttcatgggggggccgtaaagtcccgtcaggccgttcagcatgcgcttgtacagggatttcaggcgcgtatcgtattcctctttacccgctttggtggtggagtaaaaggaaacggctttcagacctccatcctttccgtactcgaaatgcagggagaagaaaaggcctccaataggttttttcgtcttgtaggctccgttcagccctgtacggctcaggtaggcgtctgtttccggcccttccagggatttgcaggttttcagggaattcagaagctgggattcctgcaaacctgtttccagggggccgtaaagaggcgaggcggcgccgcaggaagctgtataaagcacagccatgtagcgatagcaattggtcaatttcatgggatagatagggcagggatggaagtggtgcttcaatagcggattaggaatccgaatgaagtgttcaaagatgtttctgtgaaaagcaagtatattacaatcaataatttatattttgttctaacaaatttattctgttgagggttgtatccgggaaaatgatggatgattttggagaaatgcatttggtatgaaaaactgatattgacgtcggattcctaatccgcagtgtttaaaataggttgaaaaatgttgtttaatctttttgttatcagcatattaaaaatatgcatcctgttttcctgaagtgaaaaaggaggaaaggcgcgtctgttgtcccgcctcattcttccgtttttttacatgggaatcgttattatttttattaaaagtctttctgaatattcattcatttccgttttgtgtatcccatatgcatgcattgtggcggatttcaaatccgcatgtcagcgaaaaaaggaattggtgtttccttattgattttattatcaatggataaaatcaatattggggattgtttctttcaggatgcgttgtgatttttttctttctctatacgatgaaagtccttttttctcaaaaaatttgattgactgcggatttgaaatgcgcagatgaacgcgcatggattgagagcgtttgatattcaatggactgtttcttttttgcagtaatacgcagttttggaagatgtcctgatagaaaaaagagggctcatgatacgtacccgtacgggaaaaacgggaaggccgtggcggcattgctccggagcggctgttgattctgccggggctgcgggcataaccggatgtttgtgacggtttcgtttccggccgcatcttgtttgaggaagccattccgctcatggtatcggtacatgagaattgatgtggtaacggatacgtatgaacctgatgtaaatggagtggccctgacgctggggcgtctggtcggcggcctccggatgcgcgggcatttggtgcatgtgatgagggcttctgaacggaacggctctttcaaccctggggagacggctatgccgtcccttcccctccccatgtaccatgaggtgaagatagggctgccttctgcagacaggttccgcgccagatggatgaaaaaaaggccggatgtggtatacgtggctacggaaagccccatgggagcgtctgccgtgaaggccgcccgtacgctggaggttcccgtggtgatgggattccataccaatttccaccagtatatgaaggattaccatttctccagactggaaacggccgccgtgaattacctgcgcaaactccacaacagggcagggatgacagtggttcccacggaggaaatgcgccgtacgctggaagggctggggtttgaacgcctttccgtcatggggcgcggagtggatgccgtcctgtttgatcccgccaggagggatgcttccctgcgccagtcatggggcgtctggcgggatgaagtggtatttggcgtcgtggggcgtctggcgcgggaaaagaacctggtggcggccctggggctgtacacgcgcttgcagagggagtttccggattgcggcatgaaaatggtggtggtaggggacggccccatgatgaacagcctgcgcagtgagtttcctgatgccgttttttgcggaatgcgccgtggggaagacctggcgcgccattatgccgccatggacgttttgctgttcgccagtgagacggaaactttcgggaacgttttgctggaaggcatggccagcggtttggctacggtcagctaccggtatgccgcttccgcggatgtggtgctggacggcatcaacggccttcaggcggagaaaggggatgaagaggggttttattccgccatgcgccgtctgctggaagacggggagatgattcggaggcttgggaaacaggcccgcaggacggtgaattccagaacttgggattccatccatgacaggtttgaagaactgctggcttccgtggcccgggaggaaaacgggaccggctgcgcccgccccccgcgggatgccgtgctggaatgccgcacggtttttttgtcggaccttcatctgggaacgaaagactgcaaggcggacgaatgccggaaatttctgaaacatgtccgggctggaaaaattgtgctggtgggggatattgtggatgcctgggctttgtcccgcggcagccgctggcggcggaggcatacgcgctttgtccgcaccttgttgagaaagatggaacaggaggatgtggaagtcctgtacctgcgcggaaaccacgatgatattctggaaaaattcctgccttttcatctgggcggtttgaaaattgccagggagtacgtgcaccaggctgtggatggaagacgctacctgtgcgtgcatggagacggttttgacgccatttccaccaatcaccggtggctggcgatgctcggctctctgggttatgacgttttgctgatggtcaacaggttttacaacaaataccgcgcctggcggggcagggaatattattccgtttcccgcgccatcaagggccgcgtgaaatccgccgtcaattttatcggaaaatatgaggaacagcttcaacgcctggcggtaaagaggcagtgtgacggcatcatcgccgggcatgtgcatcatccggcggataccatggtgggaaaggtgaggtatctgaattgcggggactgggtggaaaccatgagcgcagtgctggaatacggcgacggccgtatggaaacggtgctttacaaggattttatgaagcgcctggcatatggcaaatgcggaaccatggaggacgcggaaacttctcccggcacgggggattcatgacggaacggcctttatccggtttcccccggaagtgggacaaaatgactttgtgtgacattttgtctcttttctggtgtgacattatgtcccgttttcctttgtcgggaaaatagaggaatgaaaggaaaaacagcgtaatatgattataatatgacatttgcgtttatttttcagtatgccttgccagattggcatgccatttgcaacaaaagaggcaagaatatgagtttgcctgcatgatgcttcaggtcatgaggaaatcaaatctcaacgaaatccattcaaaacaatctaaaataacgatatggctaaaatattaggaatcgaccttggcacgaccaactcgtgcatggctgtgatggaaggcggtcagggtaccgtacttgaaaacagcgaaggtgcgcgcaccactccctccattgttgctttcaccaaaagcggtgaacgcctcgtggggcaggccgccaaacgtcaggcggtaaccaacccgaaaaacaccgtgttttcctccaagcgcctcatcggccgtaagtacagtgaactgacggaagaagataaaaaggtgccgtacgaaattgtggaagctcccaacggagatgcctacatccgcgtggatgtgggcggtgaaaagaagaccttttccccccaggaaatcgcttccatggtgctggccaagctgaaagccgatgcggaatccaaacttggcgaaacgattacggaggccgtgattaccgtccccgcctatttcaatgacgcccagcgcaacgcgaccaaggccgccggtgaaatcgcaggccttaaagtgcgccgcattatcaatgaaccgacggcggcggccctggcctacggcttggacaaaaagtccaatgaaaacattgccgtatatgacctcggcggcggcacctttgatatttccgtgctggaaatcggcgacggagtgtttgaggtgaaggcttccgacggtgacacccacttaggcggcgatgactgggacaacgcaatcatcaactggattataggcgagttcaagaaagactccggcatggatctttccaaccagcctgatgccattcagcgcatcaaggaagaagcggaaaaggccaagatcgccctttcctccacccagagctatgacatcagcctgccgttcatcacggcggacgcttccggtcccaagcatatccaactgacgctgagccgccccaagctggaacagctcacggaagaccttctggaccgcacccgcaagcctgtgctggactgcattgctgcgtccgggttgaaaaccggggacattgacgagctggtgctggtgggtggcatgacccgcatgcccgccgtgcaggaaatggcccatacgctggccggcaaggaaccccacaagggcgtgaacccggatgaagtggtggccctgggcgccgctattcagggcggcgtgcttcagggggacgtgaatgacgtgcttctgctggacgtgactcctctgaccttgtccattgaaacgatgggcggcatcgccactccgatgatcgaacgcaacacgaccattccggtgcgcaagagccaggtgttctccaccgccgctgataaccagcccgccgtggatatccgcatttgccagggcgaacgcaagatgtttgaggataacaagctcctcggcaacttcaagctggacggcatttcccccgctccgcgcggcgtgccgcagattgaagtgacctttgacattgacgccaacggcattctgcatgtatccgctaaggacaagggcaccggcaaggagcagaaaatttccatccagggctccagcggcctttccaaggatgaaattgagcgtgccaagcgcgatgcggaagcccacgcggaagaagacaagaaacgcgctgaggaaattgacatcattaaccaggctgactccctctgcttctccgtggagcgccagcttaaggatatgggggacaagctgcccgcagacctcaagcgtgaaatagaagacaaggtaacgcgtctcaaggaagccgtctccaagaaggacgtcaaggcgatcaaggctggcaaggaagacctggaatcccgtctggaagccctgtacaaggcggcggaagccgcccagcagtccgccggggcagccggccccatgccgggcgcccctgccgaagaagagccttccgacggtccccgcaaggcgaaaggccgcgtggtggacgctgaaatcgtggacgacgataaataagcaacccccttcccgccggagggggaagcaattccccctccggcggaacattacatcccgtattactcatctacaacaacatcaaaaaacatactatggcaaacatcaaacccctaggacaacgtgtgctggtcaagcgcattgaagctgaaaccaagacggccggcggcctgttcctgccggacaccgccaaggaaaaaccccaggaagccgaagtgatctccgtaggcaccggcggccgcgatgaaaaaggcgccctgattgaatttaccgtgaagcccggagaccgcgtgcttatttccaagtacggcggcacggaaatcaaactggacggggaagactaccttatcctgtctgaaaacgatattctggccatcatcggctaaatggcaccacacacacattcaacatcattttaaatatttaacattatggctaaacaaatccaatttgacgaaaccgcccgccaggctctgctccgcggcgtggaacagattgccaaggctgtcaagagcacgctgggccctgctggccgcaacgtagtgattgacaaaaaattcggttcccccctcatcaccaaggacggcgtaaccgtggccaaagaaattgaactggaagacccgtttgaaaacatgggcgcccagcttgtccgggaagtatcttccaaaaccaatgacgtggccggcgacggcaccactaccgctaccgtgctggctgaaagcatttaccgcgaaggcctgcgcaacgttactgccggggccaaccccatctccctccagaggggcatcatgaaggctgcggattccgttgtggaagaactcaagaagatcagcaagcctgtcgactccagcaaggaagtggcccaggtcgctaccgtctccgccaactgggacgctgaaatcggcaacatcatcgcggaagccatggacaaggtgggcaaggacggcaccatcaccgtggaagaagccaagggcattgaaactacgctggacgtggtggaaggcatgcagtttgacaagggatatctgtctccctacttcgtgacgaacgcggaaacgatggaagcggtgctggaaaacccctacatcctcatccacgaaaagaaaatcaacaacctgaaggacttccttccgctgcttgaaaaagtggccaagagcggccggcccttcctggtaattgcggaagacattgaaggcgaagccctcgccaccctggtagtcaaccgtctgcgcggcgtgctgaacatctgcgcggtcaaggctcccggcttcggcgaccgccgcaaggccatgatggaagacatcgccatccttaccggcggcaagtgcatcacggaagacctgggcatcaagctggaaaacgtgggcatcgaagacctcggccaggccaagcgcgtggttgtttccaaggatgaaaccgttatcgtggaaggttccggcaaatcttccgatattgaagcccgcatttcccagattcgccgccagatcaaggacaccacgtccgactacgaccgcgaaaaactccaggaacgcctggccaagctgtccggcggcgtggccgtcatccacgtgggtgccgctacggaaacggaaatgaaggaaaagaaggcccgtgtggacgacgccctgcacgctacccgcgctgcggtggaagaaggcatcgttcccggcggtggcgtggcgctgattcgcgcccagaaagccattgacaccctcaaactggaaggtgatgaagcaaccggcgcccagatcgtttatcgcgctgtggaagccccgctccgccagctggcctgcaatgccggccgcgaaggagccctcatcgtcgccaacgtgaaaggcatgaagaatactgccgaaggttacaacgtggccacggacaagtatgaagacctgctttccgccggcgtggtggatccgaccaaggtgacccgttccgctctgcagaatgcggcctccatcgccggcctgctgcttaccacggaatgcgtcattgctgacaagcccgagaagaagagctgcagctgcggctccggagcttccgacatgggcggcatgggaggaatgggcggcatgggcatgatgtaagccccgtccgtttcttcgagaccaaggcaatcggcttcaaggctccccggtttttccggggagccttttttaatatgcttcatcaggagccggtttcgggaaaaaaagctgcacaggatgttcagagtttagaaaaatattgaatgattatagaacatatttgtctaatcataacatgaaaaagctgcataagaacatattgtttgcggcggcggtactggtcatgccttctgccctggccgatatcccggagtcttccgttccggctgccgctgtttccagtatcaagggtgcttatccgaacgccggtcccattgaatgggactctgaaatgcatggcatggaaaggatctacgaagccgaatttagaattaacggattccagtttgacgtgaagattgctcctgatgggaaaattgtgaggattaaggaagaaatagctgcttcctctcttccggaagccgtccgtgcgtccgttttgaagcgttatccgggatgccggattaaggaagcggaaaaaattactgaaggagaacttgtccgttacaaggtggaagttgcggacagccgtgacgattatgatgtgctgattgcccctgacggaaatatccttcatgtggaccgttaggctttttgttttttacatttaatgaaagcgggaggagggcggatgaatccgctctcctccttttttgaggaccggaagcaggggcgtatgggaaaatgtgacggaatgttcacgttttaaaacgggcgtgcgggagcggcctcctgtaatagagggccgtttactacgcatatggacccgatctattactttatcataggactgatactggtgttatcctgcttcgacctcgttgtcggagtttccaatgacgccgccaactttttgaactccgccgtcggttccaaggccgctccgcgcaggacgattgtgctggtggccgctttgggtatcatcatcggctcgctgttctccagcggcatgatggaaatcgccagaagcggcgtattcatgccggcccggttttccttccatgacatcatgttgatctttctggcggtcatgttgacggatgttatactgctggacgttttcaacacgttcggccttcccacttccaccacggtttccattgtttttgaactgctgggcggagccgtggccgcagctctctttaaaatttggtccggggaaccgggagtcgctcaggaattgtccagctacatcaattcctccaaagctctggcgatcatctccggcattttttcctccgtttttatcgctttcatttgcgggataacggttatgtggatttcccgcctcatcttctccttcaactatcaaaaatccttcaaatacctgggcgccgtctggtgcggcgtggccctgacggctatcacctacttcgccattttcaaggggctgaagggaagcacgctggtcaccaaggatatgatccaccacctggacgcccatatctggctgtacgtttgctgcagcctggcattctggaccgtcctgatggccgtgctccagaatctttgcaaagtcaatatcctgaaagtatccgttctcgcgggcaccatggccctggccctttcctttgccgggaatgacctggtcaacttcatcggcgttttcatggcggggcagtcttctatggaaattgcggccgccgcagcagcgcagggggcggaccttaccactctgtccatgggcggtctgatggcccccgtcacggcggattggcgttacctgctgggggcgggcgtcatcatggtgctggccctcatgttctccaaaaaggcgcaaaccgttacggatacggaagtcaatctggcgaggcagggcgggggagtagagcggttcggctccgtccccccggcccgcatggcggtgcgctatgccctgaatgcttcccgcgcggtggaaaaaatcatgccctcctgcgtcgggaggtttattgaaaaacgcttccggcctgtgccggaagggccggataacggtgcatctttcgacctcattcgcgcttccgtgaatttgacggtggctgccctgctgatttctctggccacgtcccttcggcttcccctttccaccacgtatgtgacgttcatggtggcgatgggttcctccctggcggacaaggcctgggggcgggacagcgccgtgtatcgcatcaccggagtgattacggtgatttcagggtggttctttacggcctttgccgcgttttccatgtgcttcattgtggcggcctgcatcctttatggcgctctcttcggcatcatcgccatgtgttctctggcggctttcctgcttctgaaaagttccaggctccatcgcaaaagaacccaggctgcagctcaggcgcaggccgccaattaccgggacccggctgccgccgcacgctacaatgaggaaattattgaactgatgaagcgcatggcggaaatctatgaaatgaatctggaggccctgaacgtggaggaccggaagcgtctgaaaaaactccggaaagaagctcgcggcatccgccgttccctgagcgataaaatggcgatggaagttatgcccgtcgtccgtgaactcccggacaaagaggccgaccgaggcaagcgctatgtgcagatggtggaatacgctacctccgtctttgaatccctctccaacattactacggccagccatgcctatatagacaacaaccatgaagggctggatttggaaaggatagagcttctgcggggaatgaacagccgtgtttcttccctctacccccgtttccgggaaatgatggaaagcaatgactataccgggctggacgaatgcctggcaggcatggacgccctggatgaggaatttgcggaagccgtcaaacagcagattattctgcgtccggaagacgcctccgatatgcgacgggcgcttctctatctcaacctccttaatgaaacccgggcgatgatccgcaaagtgcttcttcttgctaaaatccagaggaaatttgttcttggctggtagcctctccctgtaattcatgtccgtgccggaagccggcgccggcacggacgtattgcccggactgttcccgtattgggagaggctgccaggtcttttttattcacacggaacaaggcttctttgcggataaatcatgtcttctgcctgtgggacaatgtcttgaaaggccgtttccaggcgttgccatgtatgttgccgtctcaagaaaacaaaaaacgcaagctttgataaacaataacttgcggaacaaactggtacgggcgatgggaatcgaacccacgtctcaagcttgggaagctcgcgtcctaccattgaacgacgcccgcatgaaatgcggatgcctatttagcggcagaagacccggatgtcaagaccacagaaaaaacgtatcctctttttttgttattttgacgcagtaatgaaaaaaaacttgtcttattccgtgatttgaacataatgcgttcgttgcgcgggtatagcttaatggtaaagctccagccttccaagctgattatacgggttcgattcccgttacccgctccatttttttattaaattcacttgctaaatacttcctttatgaaagccaggttcgtgacaaaggcggcgcttagtgcgctggcacttgcgtttgcgggtacccttcccggtgtggctcagcaaactgctgctccggctgttgattcggttaaagcctccgctgttgaaaaggtttttattgtgaaaatggcggatattgttcaggccggattgaaggccggtgctctggatgtgaaagcagtgtccggagttttgaatgaggcggttaaggctgacgtttctgaccgtgtgatgggggcgatggtgtccatggctgcgggggctttcccttccagcgctcctgccgttgcttccgccgctgttcggagttacggatccaatataagggaggggcatgtgcgcaatgtgatcgcttccgctgtttcttcccagtctaacccgtatgcgtccgtggctcccatttcggaagcggttgaaaaggttctgggtaattctccggtagccgctgctgtttcttccattgctgtggatgtggcagctcagacccctgacaatcctctctccggggaaactgttcaaggttctggtctggcaagtcctgacgaaggtatttctgaggggtgtttggttctgccgggcggtcttactgtgggcggcacgcccaccagccctgctcccgtgtccaatcctgctggcaattaacctgattcttatttaataaatagcatgaagagtcttttttatctctccctggtggccgccggcatgtttgccgtccatgccaacgggcagtctctgtacacgctggcgggtccggtgggtctggaagagtcccttcctctcaagtggttcttcaacctggcgggagggtatgacgacaatgtcaacgcctccaattataacaagcaggaatccgcgttcatcagtacggacatagggtgctccctggccaactacgatgccgtgacccagtattctttctccgccaagctggggggtattttttacctgaaagaccttgatggcggaacgaatgaagccctttccaattccacgctgtccgccaaactttcccatagttttgaccagacgttgcgttataacggcagcgtctccttcgcatggcagccggaacccaactattccaacggtattgccaatgcccgccgggacggcgactacatttacgtgtatgtttccagttccgtgagcaaggcgtggacttcccgctattccacgacgctgggcgccaatttctccatgatcgactatcaggaggattccgccaagacggataaccgcgattatgttggcatgaatttcaccaaccggtacaaatggacggaacgtctggctgtttccctgggctggacgggatcctactgtaatcgcgaatacggcaataacgaattttccaacttcgtcatggccggcgctgaatacgcggtgagcgaaaatacctccgccacgctgcgcgtaggtccgcagttcaagtatgtcgagaattacggaacaaaaacctatccttccgcggaattcggcttaaaccaccgcttgagcgaccggttcatgctcggaacgttcgtccgttattccaacgaagcggtgaatacctacattccttacaacggcgccagctattattccaatgaaacatggcgtttcggggtacacagcacgctgaagctgacgcaccgcgtcagtctgaattgcggagtaaacctggttgccagcgattatacgcgtccgagttccatcagcaacagtgacacgtccaacctgactttcaatgctaccgccggtatcaagcttctgctgacgaatgccctggcccttacggcccaatattcttacacgaacggttcctacagcggctataactacccgatgccctcctacaaccgcaacgtgttctccttcggcgtgaattacagcttctaagtcttgactgaccattaatgcctttactcctctaattgcgaattttcattcacaattagaggagtttttatcttactgccttactatatttcatgaatgcccaggatcagcagaacagtgatcgcatcgtacgcaatattgactatttgcaggttttaaaaaatcgctggaaggaagtctttcttgttttccttctggtgctggtcatttccgtggtagtgactttcctgatgccgccctcctaccgggcgaccagccagtttcagattaaactgcccaagcctgtgatggatatcggcaggggaggggacgtggttgccacttccaacgtgacggccaactacattcccatgcagtattccgtgctgacttccgccgaagtgcttaaagtggtatccagaaaactgaaccttgccgcggaatgggggatgacggatgaaatggcggcgactaatctggccgacatgatcaaggtggcccccgtgcgcgccacggaccttgtggacgtcattgtttccggtccggaccccaaactggtgcagaatatcgccaaggcggtgcctgaggcgtacaagcaggaccgtgaaatgcgcgaaaaccgtctggtggaaaccgccatcaagagcctgaaggatgtccttcgggaacaggaggatgccgtcaatgaaaaaatgatggctctcaaaaagctgattgcggagagttcctacctgcccacgtcctggaggaacggtgaacaccgcagcaccctgacggccggtatggaagaagaggaattccggaatgccaaggcgcaggccatggattttgaaaggagggaaaaggaactggcttcctatgtgcaggaattgcagcgtctgcccgacgacaagttgctggattacgtgatcagttccgacctgctgaatgcggagactgtgggtgcggacgctctccgtaagacctatgctgaattttccgacaagctcaaggaaaaggaaaatctgaaatcccagaacatcggcgccaggcatcccaaaatgctggcattgctggaaacggaaagaattctgggggataagctgaacaaggaattgataggcctgcgttcttccctgaagagcaagctggaaatggttgccgcgagccggaagcactgggaggctaccgtcgcccaaaaagaggaagatcttcagaagcacgtcctgcaggttcccatgtatgaacaggccagccgtgattatgacgctgcgctggaccagcttaaggaactggactcccgatacaaggatgagattgcccgtttgcgcgtgccccgtgaggcgattgaaatgtatcagctgccgacctaccctgttgcgccctacaagccgaatgtgactattaacctggcggtgggagcgggcgccggtctgttgctgggcatcgggttggccctgcttctggaattcatggatacctccgtgaaaaccatggaagacgtggaacgggctcttcaggttcccgtactgggcattattcccaagaatgtgccgattctgcattcatccgatgccatggggccggatgcggaagcctaccgcattttgcggacgaacatagaattcaacaagaaaggcctggaggaaatttcgctgacctttgtttccggcagcgccggggaagggaagaccaccactctgtgcaacctggcctatatttgcgcccagggggggtatgccaccctgatgattgacgccgacctgcgccgttccaggcttcaccggtattatgagctggataatgaggtagggctgacttcctacctgctggaagattatcctctggaggaagtcatttttcagacgcccattgaaaacctgtacgtcatgcccgcggggcctactccctttgacccttcaggcgccttgaattcccgcaagtttaatgaattgctgcaggaagtgaagcaacgttttgacattgtgctggtggattccccgcccattctgggggtcagtgactccgccgtcattgtaagcgaggtggatatgactcttatggttgtccagccccgcaagctgccgctgaaagccctgttgaggcagaagcaggtaattgagtccgtgggcggtaatctggccggtgtggtgatgaataatgtggacattacgtccgatcaccagtatcagtattacacaacttactattcctactattctgcggatggctcttcctccggcgagaatgcggatgcctcctccatgaagaaggtggaacgttctggaaaggccaaggagctggcagccacccagtcccatgatagtgaagatttgtattaacccatggctccatgaaaaaatatatttgttccatcctttgtcttatgctgggcccggcggggctgggctccgcccagtctccggatgccgtgccgccccagggcaccattgaaatccaggtgcgcggcattccctccgacgacgctaccgctatttccgggcagtatctgttggacgggaacggtacgatacgcatgccccagctccctccggggcaggatgtactgcgcgtggtaggcaaaacggcccgccagattgaagacatgctgatggccgcctacaagaaggcggagctgtacacggcccctacgtttctggtgaaggtgcagagttcggatgcgcggctgacggaacacatcgttctggtaagcggcggtgtagctatgaagaagaatgttttgtggcggcgcggcatgacgcttctggaggcgattgtgggcgccggcgacatcacggactggggatcccgctacgtgcaggtgacgcgcggtggaaaaaccgtgacgtatgattatttttccattaaagacagggcgattcccatccagcccaatgaccgcattttcgttcctcagcgcgggatttttgaagggcgcccgccaaaacttcttccctgaggcatttttcccatacccggctttccgcaaggaagccgggttttttattgggccggttttcatgatgggggaaatatcggaaaaaacgcggatggggaaacggggggcggagtgaaggggcgtgtcgtcagcggttggtgaaaccggggggcttctcatgatcccttcttcaggcttcttgccggaaatgaatgttttcggggaagccgtatggtggaatcgcgcagggaaagaagttgtcttttgaaagtttgcggcatcggaaaggaacgcctggaaaaaggggggaaatttgtttccagcccctcttgtttatgggaatggaaggcttgagatccggaaaagattaagggggataagtttcccgatgggcgcgtaggcccttttcacattattggccggcatggtctccgggcatatattgcggagaaatgagtttagtatgaatgtaaaaaacagaaaaacaaagaaaaatgttgaacattcttaaactcaatgcatttttggaatctccaaaatatgttagagtttcgtgcggaacggctgcatgaggcttcgtaaatccaatgtgaaaacccgttaatcatgatataccgttttaagaaaacattcatcggcgtgggagggcgtgaatatatcagcaaccccaaattgagtttccctgaacatgtcaaaatccgccgccgcggaacgaatcccaggtccggccagccttacacggaggcgggtagcgcatttgtggagacatccgccgtcgcggcacggctctgctgcagtgcttccgccgcgcgccagtatctgcaccgccacggtgtccgtttccgggtggtccgcaagggtacgggccccctggccctgtactggcggcggctggatgtggagcgggttcttgctggaagggagcccgtgcgccgccgcgtgcctccgtgttatatggatatggccggggctgtcagcatgctgggagtagtgcgcagctatgtttacaggctggtgaaaaaagggctgctgcgtgaatacaggtgcaggatgaaaacagcccgtggactgcgcgtgcgctgcttttaccaccgggaggatctggaacatgtcaggctgcacgtgctccagaaaagatgacggaagcggttccggaggatgcgtttttggcttgcgcgcgggccggattgtgtcacgttaagggtatgatagcttttctgcgcggcacggtggcggaatcatatccccagcggttgatcctggatgttcatggggtggggtatgaagtgattgtgcccctgtccacgtttgacaggctgaatccccttcccggcagagagctgacgctgaaaacctacctgcatgtccgggagaacatgcaggtgctgtacggttttgccacggatgcggaaagggatattttcctgctgctgattgaacgtgtttccggaatcggcccggcaacggcgattgccattttgggttccctgtccgtggagcagttcaagcaggcggttgtgggcggagatgtttccggcattgctcgggccaagggggtgggcaagaagacggcggaacgcatcgtcctggaactgaaggataaagtgggcctggccgccacgtgggaagcccaggcccagggcgctacttcccaggccgccggggacgcggaattggcgctgattgcgctcgggttcaagcaggtggaatcccgcaaggcgatagccgcccatctgaaggaccatccggatgcagacgtggacgagctgatacgcgccgctttgcgttccatgaattgaaggagcttccggaggaaggaaggtgtttttgcaagtttttgattttcatgagggaacatgtccgcttggcggagtgttccctgtttgcggaagctgggggaacatactgccatgatgggggaacaatagtgttgacggctggttgaaacgtttttaaacttgcagcgtccatggtacttgaataagtccgggactagtaattaatcaaatctgaagccctcaatcttatggccaaatacgctattaacggttttggacgcattggtcgcaacgtactgcgcgccatgtccaaggaagaacgcaacaaggttgttgccatcaatgacctgactcctatcgaaacgatcgcccacctgctcaagtatgactccacgcagggcaagtttgacggtgaaatttccatcgagggtgattatctggtcgttgacggtcacaagatcctcatcaccgtggaacgtgatcccgccaaccttccctggaaggatctgggcgtggacgtcgttctggaatccaccggcctgttcaccaagcgcgacgccgccaagaagcaccttgacgccggcgccaagaaggttcttatttccgctccctccccggatccggacctgactttcgttctgggcatcaacgacagcgaatacgatcctgccaagcacgatatcgtttccaacgcttcctgcaccaccaactgccttgctccgatggtgaaggtgctggacgacaagttcggcgttgaaaagggcatgatgagcacgattcactcctacacgaacgatcagcgcattctggaccttccgcacaaggatccccgccgtgcccgcgccgccgcgatcaacatcattccgacgaccaccggcgccgccaaggccattggtgaagtaatgccgaacctgaagggttccctgaacggcgcttccttccgcgttccgactccgaccggttccctaaccgactttgtggccgtgctcaagaaggatgtgaccgtggaagaagtaaacgccgccatgaaggaagccgctgaaggcccgctgaagggcattctggcttactccgaagaagcgctcgttcttcaggacatcgtttccgacccccactcctgcatctttgactccggcttcacgtatgtggtcggcggcaacctggtgaaggtctgcggctggtacgacaacgaatggggttactccaaccgcgccgcccaggccatgaagaagctgggcgacagcctgggctgcggatgctcctgcggcaagtaagttctttcggacaacgcttgctcttcagttgcacgacaagtcttgccgtccgcctgtttcaattttccggctttcctggccggttttgccgggcgggcggggatttatccgggagggcagaaatgccctcccttttttattcattgaaccaaacaatataaaccgatatggctaaacttactgttcgcgaccttgacgccaagggaaaggaagtcctcatgcgcgtggatttcaacgtccctctcaaggatggggaaattaccaatgacgcccgcattgtggctgctctccccaccatcaagttcctgctggaccagggcgcacgcctcgtccttacctctcatctgggccgtcccaaaaacgaacccgatcccgctttttccctgaagcccgttgccgcccgcctttccgaattgctcggcaaggacgtgaaattcgtttccgccgccattggcccggaagcggaagccgcccgcgccgccatgaaggacggtgatgtggttctgctggaaaatgtccgtttttatcctggtgaaaagaagaacgagccggagttcgccaagtccctgctgggcaatgccacgctgttcgtgaacgacgcattcggcacggcccaccgtgctcacgcttccacggaaggcgtgacgcattttgcggaaaagagcgccatgggcttcctgattgaacgtgaactggaatacctggaaggcaagctggaaaacccggaaaaaccctttgtggtgattatgggcggcgccaaggtgtccgacaagattgaagtgctttccaaactgatggagaaggctgatacgttcctgattggcggcgccatggccaatacgtttctggcggctgaagggtatgacctgggcgcttccaagattgaaggggacaagctggatctggcccgggaaattctggcggcggccaaggccaagggcgtgaaattcctgcttcctgcagatgtgcgcgtagccatgaaatttgaagacggtgccgaaaccttctgcacggctcctttcgctgaaggcggcaaggtgccggaaggcggcatggccatcgacatcggcgacaaagccattgaagagttctccgccatcatcaaggatgccaagaccgttctgtggaacggcccgatgggcgtatttgaaatggactgcttcgccaagggaaccaaggaagtcgcggaagccttggcggattcctccgccatttccattgtaggcggcggtgattccgtgacggcagccaagaaattcaaggtgcaggataagctttccttctgttccacgggcggcggcgcttccctggaactgctggaaggcaaggttcttcccggtgtgggggccttgaccgacaagtgctgctgcggcaagtaaccgttcatggccgggcggattgttttcgcctggcgttcagaatgggctttttcattccccgcacccgttttcgggtgcgggatttttgatttgccggcttccgttgaaaaagcgcgggagttttgcgattccggctttttgaataaggtgggaatccatgctcatgccgtctttccattccggaaaggaaggcagtctttttttgggcttgctcttaatatgctccccggtagtctgagcatgatgaaactgctgcattgttttctggctgtcctttggtggtgttctcctgtaccggctgcggatattcccgatgcggagaaggcggaatatggcgggtatcccgggcggtacatccttcttgattctcctcaacccgaccggcagagcctgtccactcccgtagctgcctatgtccatgacaatgggatggaagtagctctcattggtgctgttcatgtggcggaaccggaatattacgaccggctgaataagctgttccgcaggtacgatgtgctgctttttgaaatgattggcggagagggcctccggcgggaagaggaattgcgccgcaagatagaccgcagcaagccgctgggggggctgactctggaagaggcgcgggaatggaaccggatagtggaatggaggaagaaatgcgggcaggaggaaaagtcttttttaatggggctgctggggggcgcctacaaggagttgagcaatatgctgggactccagacccagcatcagggcattgattattccgcagcccatttcgtccatgcggacatgacgctggatgaattccgcgaggcgcaggccagaaagggtgaaagcattgccggcctgatgcttaaatccgtcttgtcctccctggttgagaaaaccggaacgaaccgggccggtgaatttggattgatggcggatttcctggccggcaataaaacggggttgaagaataagctgatgggcatgatggccaatgctcctaatggtctggagaataccgtgattctggaaggccggaacgccaagtgcatggaagtgtttgaccgttggagcggcaagggcgtgcgcaggataggcgtcttttacggagcggcgcatcttcccggcctgcacggcgctcttttggaacgcggctaccgtcttcgggaggtgcgctggcttccggcgtggagcaccagggagcagggtgcggacgggcagcgcggggagggttgagttttgttactttttccccggtttttccaggacgggcggtgtagcggcggatgaacatggttttccgccgctccgcctttgaagagggaagaagagggggggctttttccctgcctggggcaggatgccgttctttagggggcaggatgccgcgttccggagggaaccatgcggacgatacctccgcctttgatgcgcatggtgaaggaaagggcatttccggaagtgactttccgggtttccacgctccatccgtcatttttttccgccagatcccggagaatggtggcctggtatgccgtgtttttgtccaggaaattcaaaggaatggaaacggtgcgttccctgccgtctccgttcatcagagcaatgtaccactggtttcctgaccgccgggcgaaggcagcgcattccccaatggcagacggcggaaggacgatggtttcctcccatacggaagggatgttccggacaacttcccgttcaggggaatccttcgggaaagcagcttccatgtccgcagggttggagacccagtgaagcatggaggacgtgtaaatgatattggcagccatttggagggtccaggaagagccgcgcagcttggggccgtggccaaagtagcctcccgtgaaatcggcgtggccggatatcaggcgggtgaaaggcagcgcgcagtagtgctgcccgccaatggcggcccagatgttctgttctccgccgtaaatgccttcccggctcatttcgtgcggccaggaacgttcctcccccgtgggggtattggctccgtggaagttgaccataagcttgtttttcgccagattttccgctacggcgtcgtagaaggccaagcgttcctgagaggcggagtccataaagtctatcttgattcccctgattcccgttttggagagtgagccgaaaaagctgcgcatattttcccagtcattggcggggttgttgacgtctgaccatcgcacccatacccagatgcctacatttttgccagcggcgtagctggccagtttggccagcttgcccatgctttctggtagggatggcccccattttttccacccttcgtcaacgaggtgatattcccatccgaattcggcagtcatatcgacaaaggcatattggtcgttttccaggacattcccgcggtcccaccaggtccaggtggaacggcccggcttgatccagggggctttggaaccttccggaaaaagattcctgtccggttccggagccagggaagggatgacgtcgtcccggaccaggaaacgggggaacccctctttatgaccgggttttactttgaacctgtatgccccggaatcctcgaccgcgtctattaaaactatgaccaaagcaaagcaactcatccttcctatttcctacccggacagcggacgctggtatgctcccgtccggaaaatcaaaatcgacgaacggacgtacgccctaaggatgggggaacctgtccagctgggtaccgtcaaagagattgaaaaagaattccgggtgggccgccgcgtgctggcccgcctggcggacattggcgtcattgagcgggtgcgcccgtctccttttcaatctatgtactactttgcggacattgccgcattccttgagcggacgcggacggccccggcgttctggtcctccgtccgccgggaggcttatctgaacggaccttctccgcaagatgcctccctccggttgtaatctaacattttttatcctggccgcggcgtgaaagccgcggcctgttttgtgccatcatgcgagcatgttttcacgttcccctttcctgtgcggcgactccctttccctgatggagtgcatggacaacgattgttatcacgccgtcgttacggacccgccgtacgcttccggcggcctgacgacggcggaacgcaaggcttcccccgcccggaaatacctgtcttcctcaaggtatctttcttttgataacgacaccagggaccagagcacccattttttgtggtccgtcatgtggatgcaggaggcaataaggatcacccggcacggcggctggctgatggtcttttccgactggaggcagcttcctttgacctcggacgccttgcaggtggccgggtggacatggcgcgccgtcgtcacctgggacaagacggaggcttgccgcccacaccagggcatgttccgcaaccaatcggagtttatcctcattgccacgcgcggcagcatcggcaaggagcaggaccgcccgcgcgtgtttccggctggcgttttccggcattatctcaagccttccgacaagatgcacctcacaggcaagcctgttccgctcatgcgccacctgatgacggttcttcctcccggttcccgcgtcctcgaccctttcatggggagcgggacgactcttgttgccgcccgcgacctgggacacgtcgctcacggcatcgacctttccccggataatgttcgcattgccgcggacctcctgggcgttcctgttccctgaccgcggccagcccgcggagagttcgccgggcttccgcgagacacgcgcggaccactggcgggagtgtctcacatgggacaaatgacccttacgatttttcaaaattgacccttacgggcatttatgggcgtaacttctgcctcgccccttccattttcccctgaaacgtacgtattttcaaccgttttcaagcttcttcaagcgaattcaacccttttcaagcatttatggttggtcacaatgctgggcattttgtattcccaggggtggggggtggattattccgcagagatggtcatgaggctgtccaaactgttggccggttccggttatgatttgtcgtggctcactttgtccgcccccattttagcccattgggagcttctgggtcagcaggagggaacttatacgcggatgtgctgttccattccggacaggaagatgaaccaattttcaggcgtgcgtctggtgcggacttccaaagaggggggaagtctctttattgacaaggtgatcctgctcagggatgggcaggaagttatgtcccgttctttccgttcggctcttacccaggaatctcctgttctggaggtgtccatgaatatggatgattacgcagagaatgtagagaatttcgagtggtcaatagaagtgatcatggctccggccaacacatgcggcatcatggaaatgatgcggaaaaaggagctttccaacggtaaagagaagcagatttgatggaaagctgccggagcggtctggtggatacgcggtttcgtattcctgccgcaaccccgttcccggcatggaaaggggcaagaactgttttcccatgggtgaattcagccacgggatgaccgcagcggatttaaatgtttttcagcatgtccagcgtttcccggagtttgtccgcgggagcggcgcttgccagccgcgggaatttgttggacaacaggataaaatccccgtttctggtgagcatcaggcgctgcccgctgatttccaccatggagatgttggcatgggatgccaggattttgattttgtgggagtccagcaggtggcgcaccgtttccggcgcggggccgaagcggtcttcccaggcgcggagcagattgtccgcttccttaagggtccggacggtggccagatccttgtaggcggagatgcgcagggccgcgtcactaatgtattccctgggaaggaaggctcccagatagtccttgcgggattttgcggcgaactgcgtttcgctgttaatgataaagtccgttcttagagccgcatccggacggggggccgtgcgtttgccctgcatctgggcgatggattgctggagaagctggcaatacaggtcaaagcctatggcggcgatgtggccgctctgctgggttcccagcaggttgcccgcaccgcgtatttccaggtccctcatggcaattttgaagccggaacccagttccgtatactgtttgatggcggagacgcgtttgcgggcgtctcccgtggtggcggcggatctggggagcatgaggtaggcgtaggcccggtggcccgcacggcccacgcggccgcggagctggtaaaggtccgccagtccgaagcggtccgcgcggtcaatgatgatggtgttggcgttcggaatgtcgatgccggattcgatgatggtggtggccagcaggatgtccgctttcccctgcacgaaggtgcgcatgaccttttccagttcttctttaggcatttggccgtggccgatgacgatgcgggccttgggcaccagggcctggatgcggtcccggaacagttcgatggttttcacgcggttgtgcagcaggaaaatctgtcctccgcgctccagctcgcgttccatggcctttttcatgatgcgttcgtcgtaagggcacacgcttgtctggacgggctgccggttgacgggcggggtttcaatggagctcatgtcacgtgctcccatcagggcaatgtacagggtgcggggaatgggcgtggcggacagcgtcagcacgtcaattcccttgaagcgttccttgaatttttccttgtgcctgacgccgaagcgctgttcctcgtcaatgactaccaggcccagatttttcatggatacgtcatcggaaatgagccggtgcgtgcctatgacgatgtccacagctcccgttctgagcccttccagcgtggagcggatgtccgccgcgctgctgaagcggctgagcatttcaatacgtacggggtattcgctcatgcgttccttgaacgtgcggaaatgctgttccgccaatacggtggtggggaccagcacggccgcctggcggcctcccgtcacgcatttgaaggcggcgcggatggcaacttccgtttttccgaagcccacgtctccgcagatcaggcggtccatggggcgggtggattccatgtccgctttcgtctgggcgatggcgcggagctggtcctgggtttcccggaagggaaaggagctttcaaattcccacatccatttgctgtccggggggtggctgtagccttttcctgtctggcgttccgcctggacgttgaggagctgggcggcgtaatccgccacggatcgttctgcggattttttggcgcgctgccatttggagtcccccagtttgttgagttccggcgttttgcttcccaggcctatgtatcgtgaaaccaggtgagcctggctgagggggacgtgcaggatcgtgttgtcccggtagaggatgttcatttcctcgtctccggagtcaggggaggcggaaatgttgatgaatttgccgatgccgtagctggtatgcaccaccagatcaccgggattgacgtctttcagggatgcctgcgcgcgtgccttgcgcgccttgtcttcccggctggcgcggcggcgcgccgtagcggactggtacctgccgaacagttccgaggaagagaggacggccgttttcgcttccgggatgctgaaccctgccggaagttctccgcgaagaggggtgatggacagcagagcgggcgttccggcgcagatgtcccggaagcgttcttcctccccttcattggggaagaacatgctgacattccatttccggtccagccattcccggatttggcgttccgccagttcacggcgcatttcctgcatcacgaagtcccccgcctcaaagctgcccaggggattgtcatggatggcaagggagaagtcttcttcccccgccgcattttccgggggagaggtgaggatgcatacgttcccccgttccttgcagaaaggggcggtaataaccaggtcgcccggtttgatccagtcccgcagggtttccgcgccctcggcttccgtcagtatgaggttgacgtgttccgccttgcggaaggaaatctgggaatccacatcaaattcccggatggattcaatttcgtcgtcaaaaaactccaggcgcacggggtgggaggactggagaggaaagacatccaggatgccgccgcgtcgggaccattgcccgcgggaaatgacctgtggaacaccttcaaatcccgcttccccaaactgccgtatcaagtcgtccggtgcgtgcgtctcccccgttttcagggtgatcccctggttttgcatgccgtcgggggacggaacctcatcgttcaggctgccttccgttaaaatgatggtttgcccgcccgtgcggctggaagagatgcggtgaaggatattcagacgttccgcggcgagctccgggtcccccatttcctcccccagggccacctctttttccggaatgaagaggaggtggcgcactccccaggtttccagttgggctgcaagggcttcctgagcccgcaaatggggcgcgaccacccaggcccgtgcggtatccggaagggttctgatacacagggccgctacaaacggcaccccgggcagggaagtatggtcgaaaaccgcctgttcctctgtgcccagttttgccagttcccggtgaaagggggcggtacgggctaccctgtccatcagggcggatatggaagcttcttctgccatgcgtgtctgtgaatccctgttgagggaagtgtgccgcctttccctcccgtgtcaacggtttttcagggcacaaaccgcccttcgttttccgtcgggggactgtttccacggcacgccgcggcatagttcaggaagaggaacggaagcggattttaacgccggccttgcgccatttctgttcaatttctttggccagttcttcatagctccgtccgtcaaggaggagtttctgagcttccttttcactggttccggattgaatggctttcatgtaattcttgatgcgccgggcatcgcccttgccgtccatgtggtaaaaatagtaggccatcagggcggccaggccgtagttcaggttggcgttttctcccgtgaactgggaatagggcatgttcatgtaagcttccaggccgggtgcctcaaagtcatccccaagggcccgtccccccgtattttttttgccgtattccgtcacgcgggagacaatgtgggatcggttggctccaaagttgaagcggccaccggcatagggcgtcatgcccatgtattccgcggagccttcacaaaaccagctggcctgcttagcctgcgaagacatgagctggtgcgtcagttcatggatgagtgtggaagcgtccttgtcacggtcaatgacgtatgtgcttcccatggttttgactcccagggaatcgaacggaaccagaattcttccgcggtcccctggccgcgttgtccccaggaagatgcccgccgtgccttcgcgtccgccgttttccagataggtgctgaatttttcatacaggtaggcggggaatttggcggaatcgtcatgggcaggggagtttcctataggaagggttttgttggccaagtgggtggcctcaaagaggaggcccaggcgcttgatcatgccggtgcccagcttggcgtcgcagataaagcggaaatggggtgtttcataaatatattctcccggttcctccttgatggtttccaccttgaaattgtccgggcatttgacgctcctgggccacggcaggtggtaattgtccgccgtattggaggggagtgccccacctttttcctgttccgcgatgaaatccctgtcttcccgggagagctgggagaggggaatggagacggtttggccgccggaacgtttcagcacggctttctggccgtccagcctgatgaattctgcttccagttttttcccttggaggttggtccaggtgcgcccctgtgcaaggggggtaaggaaaagggcgaacagagttcccgccgccaggcagaggcgtgcgggctttttcatcaggggtaagacgggaggcatgaacataattgcgtttaatgtttgggacgcggcagcatcaggagcagcagcccgcagaacagcatcaggcatcctgccgccgccagggtggtggtcagcggaacgccctgatccttgaaccatcccccaaagaaggagatgagggcgcccacgccggcggatgtgaggttgaggaggccatagccggttgcggaataacgctcgtcgatatgggagcgtagcacaggcatgagggtggcgtccagtgatccctgcgccagcccctgcgtggcgaccagacccagcatgagcacgagcgggacggtgatgtcccagccgaagatgccgggcagcagcgccagaaccaccaatgggccggatatggtgaaggtgatgcccggcaccagggcgcgggcgcgggcgttgcgcctgtaccacatgtccgccaggatggcgcctcccagcacggcgacgtatttggctacggagctccacagggtggcggcggggcccgcttccgcggaggagagctggtatttgtcctgaagcagggtgggataccaggtgagaaggaaccagtttccggctccggcaaaggccactacggccagtagcatccacatggggcgtccgctcagaaggctggaaaggacggctccggtggaaagtttggaagagggttccttgatggcctgttcgtcattgtccacattgagcagcaccgtttttttctccggtacggacggtttttttgcctgggccgtatccgccggggctttggacggatctttcaggaacaggatgaggatgacggcgtacgccacgccgatgaggccgaacagggcgaatgtcatgcgccatcccgtccatgaagccatggtggcaccgaaaccggcgacggccatgcctacatagatgccgctcatgtgcaggcccgtagcgatggagcgcgtgctgccgcggtggtagtccgtaatcagggccagggcggcggggatgtagaatgcctcgctgatgcccattgctccgcgcgcaatgagcagggaagtgtaatcttccgcatggccggtccaccatgtgaccacggaccagacgacgagagagcagaggatcatcagccggcggctgtagcggtccgccagaaagccgcccaccgggctgagcagggcgtaaatcagcaggaaaacggaggtgaccatgccgaactgggcttccgtctgcggaatgtcccgtacgatgggttcatgcagggcggaaaggagctggcggtcaaaatagttcagcatgaccacaaaccacaggacaatgacggctacccaggcccacaggcccggcttggtgttcgggtccgtgacggaggcaacatttttaacgccgttgcgcacggcggagacgatgatgatcgccaggacgatgatggtcagaatgagaacggcgtaatcaaccgtgctcatttcaaagtggtaacctgcggaggcggaggcgtttacgggagtccggacgcccggggccgtttccccgctgatggtcatgatttcagagcccctgacaacggcgggaaccgtggcgatgcccacgggccattccccctggcgcgtccatgtgtttccgatgacgtcatagaccaggatatcccgggactgcgccacaggcctggacgggtccggcgagttgccgcgcttgtctccgccgatcaggagaatggagttttcccgcaccggggcgggacccgcggcggcggctacgggcattcccggtccggcaagctgctgcctgccggaggagccccatttggaagggtccttggacgtcatgtcgtagccgatcatgtcggaaagatacgtcctggaggtttctccggagttatccctggacagggaacagccgcctatgatgaacagggtgctgtcgcagacggcagcggtggagagaatgcgcccctctccgggaaaagggggaagggaaacccatttcattttatccgtgtccggcgtggtgtccagcatgtagatggtattgagtgcggtttccggctgctcccggtctctgccgccgatgacgaacaatttgttcccgtgggcggcgcaggaggcttccgttacggggacgggaaggggaggaagcttttctacggagccgtccgttttaatcagcagggcatctttcaggatgccctgagcattgtggcctccggccacagccagccccttgcccacgctggcaaaggcggcgtaacccagcgggacgggcaatgttcccgccttgctccactggccgttgcgaagcttgaaaatatcctggtagtaggttttggggccgcgttcctccggagttgaggcgcccggcgcagcctgggggaagttggcgccccctgcggcgatgacggactggctgccgtcgtcttccgtgacggttccggcaaccatgccggcgcggcctgccgggtccggaaggtcgggaacagttccggacgtccggacatccacggaaaaggaggcgtcagcggccggagccgcgatgagaagcagggctgccagagcagagccgcaagccttggaaattcgggtaagggtgcgtgtcatgtgcatatgttgagaggtttaattggattccggtcaaatcaggggagggagatgctccatacctcaggagagcgcctgccgggtttgagctctccgttcacggccgcgaaacggtcctgccacgcgcaacacggaaggacagctctgggcgcggcgatggggcctgcgtcgtgccatgtcatgtctgccgtgtctaggcacagggattggttattgaagccgggattagtttggggagtgtatttttttccggagccgtcatcccccccaagcaggtaaatgacgccgtttccggaaaccggggccggggtgggggctgcggcgatggcgtaaggcatgtccggcaggcgcgtccatccgtgttccggagtatagctccaggcttccttcagcagttcccggacctgttggccgtcctgttcccgcaggccgatgccgccgagcacgtacagggctccgtctgttgcggccatctgatgcaggaagcggccgcggcccggcagcggggcctgttccagccatccctgttccgtccggcgtgtgtccagcatgaagacccggttagtgcagtcctgctcgccggggcgttcgcaccctcctgtaagatagactttcccgtccaggacggcagccgccgtatatgccagggagatggggagggaagggaaaggatgcgtggtgacagttccctccgcgaggttcagcaggtaaacgtctttccggtgcccttctttgccgcagcctccgatgcacagcaggccttccctgatgccggcggaggcgccgtatgcataaggcgcgggcaatgtgccggcctctttccattcgttttcccccggagagagcgtaaagatacggtccgtccacgttttggctcccccttcaagcatgggcttttccgggaaattggtacctcctgcacaaatcattatttctccgcaggtccctgcgtacatgccggcgaagccttccggatcgggaagggcgggtaaaggtgtccaggatgaagaatagcggctcataatacgtgtaaatgactcgccatatactagctaaaaaccggcggctgcgccagtattaacctctggtcctatttttttgaataaattcctttccttgcgcctcttaccaacgtagaagaggttaatcatatgaaaacaggaacccgtttgttgattttatgcctcctggctcctgccgccctggcggaaaatatgtccctgcggtccggcagggtgctgaaagacgccgttgtagtgtcttccggagatgattttgtcaatatccagtacacggacggggtggccaaggtttcctataaagatttgacggatgcccagcaaagggattacaggatgacgccggatgaagtgaaggccaggctggaccagcgaaggatggaggaagcggcgcgcagaaagaaggcggaagaagccaggaaggcggccgatgaagaagccaggaagatccgggagtccctgtctgaggcggagcggcatccccgctacctggaaggggcggatatttcccgcatgtttttgctgatgggggaacttaccaaggtggaggcggaggttatggctctgcagtggaatgccctggaagcggaccgtgtgggtttgccggaagacgcccgcgttttccgcgcaagggcggcagcctatcaggagcagataagcgccatccgtaaaaaaagggaaaccgcggaacagtattggcaggatttggagaagaaatacctggccttgaaagacggtactcagaagaagattgcggatttgaataagcaggtttcccaattgcagggggaagtgagggaggtggccagccagccgagaacggaacgcatcattgtccctccgattatcaggacgtggaattatccgccgccgcctgtctttatccggccccaaccgccccctccccgtcccgtgcctccgcgtccgatgcctttgcccgtaaagccgagtttgtacagaagttaaagatgctccggagcattcccttttctgtccatgggcctgtgccgtttactggaaaaagggactgccggaaaggaatacgggaaacaggccgcccgtgcggctgccgccatggcctgccggaacattcctttgccgcagagggaaagcatcagattccgggcagggggaacagtttcatgcggcccccctggaaggaggccagatgcctgaaccctgcctgccgggccagttccccggcccgcttgaaatcccgccctacatcctccggcctgtgggcgtctgaactgatggtgaggggaattcccgcctccgccgccattttcaggaattgcccgtccggatattgttccccgcacttgttgtgccaaccggctgtgttaagttccaggcaggctccggtttcccgcatggcttccagcgacggttcataataacggcgcaggtctccagaagggcggaagccgaattttttaatcaggtccgcgtgccccatgatgtggaacattccggaggcggccatgttccggaagcgttcccaatactgttcccatgcgtcctccacatccgtccggtgccagaaatccatcctgtggggattgtcgaattcctccttttccccaagataatggacggaaccgatcaggtaatcccatgcgtgcaggccctgcaggtgctctatccatggttcgatgccgggaaaccagtcgcattccagagcggaacggaccgtcagtccgtgcagcgcggcgcattcacgggcttccgtgagccagtccaggtaggccggcatgtccgcctgcttcatgcgccagtcgtcaaaaggttccccaggcatcggggcatggtctgaaatgccgtattcccggagtccggctcggacggctgcctgcacatattcctgcggagtgccggaggcgtgcaggcacaggggggtatgggtatggtaatcgcagtacatggaggggaatgcccatgctagcatggcggagcggacggttcaacccggagggatgtctttgttcattatttgccgtctttgactttatgagttgattttatggacaggattttttagagttgcgttaaataggacacgtgacatatgagtgactggcaaggcttttccccgctgaatgattttactgggccgctcctggataacctgaagcgccaccccaagcgcattgtttttccggaaggggaggatgtccgcgtgctgcgcgtgtcccagcgctttgtggaagagcaggccggcgcgcctatcctgctggggaggagggaagtcatcacgagaatggcggaaatgaacggaatttccctgaaattcgtccgtatcattgaaccggaaaaaagctcggatcttcagatgttctgcgaccgttatgaacgggcggagcagatgttcggcaacgggttgcctatgaatacccgtgaaattgtttccgaaccggttcattttgccgccatgatggtgctctacggccaggcggacgccattgtggccgggaacatgaaaagggtggcttccgttttccgcgcagtaaacaagtacaggcaggatcccgttcccaccaagcccctgtttgccatttccattgtgctcgttcccgaattttccaagaaattcggcggccgcggcgtctattttctggcggataccggggtaaaccctgaacccacggtggaaaatatggcctattttgccgtagagacggccaaaatggcccgccacatgctgggtaaaagcgttcgcgtcgccatgctgagcgcgtccacttcgggctccgttccggaactggctgcggaccgcaccagggccgctgcggcgctggcgaagagcatggtgcagaaggattgcctgaacaatgaaatctccatagagggggaaatccagattgatgccgctctgtcgtcagattcctacagcgtgcgcgtgcaccgcaactccatgcttcagccaagtgaggtttgggtcttcccgactctggatgctgcggatatctccaaaaaactgttgtgcatgatgccgtccgtatacaactatggccttattctgggcggtctgctcttcccgattgcccagctgccgcggctgacggatgaagacaggatgttcggtactgcgctggtggtggggaatgaagccattaaattccacctgttgtatccgcagggggttgctccgctttattgaccgggcgcggcgtgtccgtgaccagcaggcgcttttccttgcgtacggccagttttccgccgggcagggaagttcgggaagggccgtccgtattcaggatgtccattacccggagtacggcgtcttccgtcaggtccggaatatgttgccggcgcaggtaatcatgcacggcgcattgtctcagctccgcaggaagcaggttgattttcggcaagaacaggcgcccctggggatctgtcaggttcatggagtccagcgcctgggaaagcgccgtgcggatttgattttccaggcggcaggcacgtgaaaagggaaggctggtgtccctttggaacagcgcattcaatttgggaataatctcatggcgcagggcgttcctggtatattcggcagactggttgctggaatcttccctccatggaatatggcgatgctccagataggaggtgatatcctcccgggaaaaatccagcatggggcgtacgacggtcaatccgttggcccaggtggagacggggaacatgccgtgaatgccggaggcaccgcggcagaggtgaagaagggccgtttcctgctggtcgttccggtggtgggccagagccacgagagcccccgggtaaccggcggcccatttcagaaacgaggcctgcctggcttccctggccgcttcttcaatggctattccgcgggtatgggccatactgcggacattgacgcgttcccggacacagggaatacccagggaggcggcgtaacggagcacaaacatttcctcttcctccgcttccggacgcagctggtgatttacatggcatgcaaccagattgcatcccggcatgccggacagcagggaaagcaaagccatggagtccctccccccgctgattccggcaaggacggggcggccggagcggaggagttccgcggactggctgtcaaaatggtccggtgtcaacatggtgctgctgcgagtgaatcaggaaaaagagatcaaaggaagcctgcaaataaaaaccccgttttccgggaaggaaacggggttggaaaattgctgaaggcagttcttacttgttgagcttgggcttgcctccgctgcggcggacggtgccgaagcgcttctggaatttgtcgatgcggccttccgtgtccacaaactggttcttgccggtgaagaacgggtgggaatcagaggtgataccgcaggaaaccacgaaatgttcaaccccgtcaataacttccgtcttgggagaacgaacagtggaacgggtgatgaagcggcgtccggtggtgatgtcaacaaaaacgaccggattatactgggggtgaatatctttcttcatggtgatgtattgcgtttccgacgcaaggggaacgcaagtataaatatgtttcattgcatgtcaagcatccccgcgtaaaaataaggaagtttgtggatgacggttcgggagcttgcggaaggaacggttgtggagatgatatgacggaaaaatggagcaggtgttgaagaggcccccctggtgggcgtggttttccctgatgggattggaaatcccttctgccgccattgcctgggcttttgccgtcagccagtcccatctggtggtagtttcctccccctggctgtatcaattcctgtttgtggctgtctggtgcgtcaatatgctggaccgggtgctgaaaatattccggggcggttccgctgtctacacggatgaatgcctgctttttgccaaaaagcattgtttcgttatctccctgctcattatggtggcggccgtgacggggctttggatcatgtttttccaattgggtgtggttatttttcaatttgcctttctgcctggcgtctgcagtctgctctttctctatttctcttccaaccctcatcagaaagggagcctgtcttccggattcgtcatgggggcgttttttgccgccgtttccttcgctacgggtgccggaataccggcctacttttacgggacggtaggcggcggctggggaggccagctttccgaacccacctggtatctggtagcgctggtcatcctctgcatgttcagccgcaaacggtggagtgaagaagaggatgaggacgggcaggattccgccgaccgcgacatggtatccctggtatggatgggggtgatagtcatttacgtcgtattctgtctggccgccgccgccagggaatataccggggatgcgtggatttattatgggctggcaatggcgggggcattcatgtttgtgctggacaggctgaagatgaacatgcctcccctccttctgcacacgctatcctgggcggcactgattttcccattgctgttgagcggtattctggcgcaggcttcctcctgattggctgggcggattcctgctatggagcgcggcaaaatacagggaagttgaaaaaataatattttgtggttgcaatattgggaagaggatgataaattctgccccgcaagcacgttctgcgtgcaggcaagtggctcggtagctcagtcggtagagcaggggattgaaaatccccgtgtcggcggttcgatcccgtcccgagccaccattttttctcccaatttctaatccctcctttttatacgggaagtagctcagcctggtggagcgcctgctttgggagcaggatgtcgcaggttcgaatcctgtcttcccgaccattttaaagcctgtggatcaaatgatttacgggttttgttttttgagctgttccctggtggttgtccgtaaaataggtggagtggaagcggggcatgcctggaaagatgaaaaacacccctgttgcggcggggcggccgaacctgcagccagttaaaaaaagccggaaatcttttgtgtccgaagcaacgcggacagaaaagcgatgcaaagttcttgtaacacccgtgtgctgacgaaagcctggtcccggcggcccggattttttctgacggcggggcggatgaataagatttgctaatgtgccaggctgaaaaacggtgtaaagaaaaccgccgcggggtgggaagtgcggcagaatggagaaaataatagatgatagaaatagttttatttcttttttagtatataatattcggccaggacgccctgattgactgtgccttctttgtctgacagcattactttgcttccatcgagtattttataataagatttttcattggaagaggattgggccagttccatcaggcggccattgatgaaatgataagagccttttgattcgaaaatagcgtctttttctcctatgtattcgcttctcaacacataagtgttatcgttgtttaatgttaacgccgtcctgattccttcacaatcggcagcaggaagaattccttcataagtgccgtaaaaatttaaattctccaactgtttttctgtttttgtttcgccgctctcaattcgagaatgatgattttggggggaatcacagccggttatggcaactaaacatgcggtccataaaaaatttattttcatgacaagtttttttcagctggtggtttgtgacgtgcgatgcttgatccaatggggcagggaagggagtacgttcgtttcctgtttttccggttttgccgtaatataatgaaagtctatggaaggggcaagatattttcttttcatggagcccgcgagtattgatgaatgccggattaagtaatttatcccgtttttattcaactttgccggaagaagagttttccaaccgggattgagtgttttgcagtccgttttgcgaagatgttgttttttttgaggggagccgagtgtctggggaagccccctctttgcagatattgccgagaaggctggattttttgcttgagattaggaagaaggattgcagagtggcttgatgaggcccggccgacaaaagacattttccgtttcctggctggcggggttggggtggtcgtttggcgggtatgtgacgggaacacttctggcggcgggtgcgggggcgctggattttcccttgctggcgcaggtgatgcttttggccgcggcggtttgttttgctgcctctcttgtttgtgcgggagcgtgtttccggggcagcaagattgcccggtggtacttgcttcttgtcctcgtgatgattatggttgcggttctgtttgggaatggaggcggttaattagtcatttgtatatcttttgattgaccgcgtgcgcgcgtatgtatactttccggtcatgctccttcgattcttatcgagtctcttttttgcgtccggcattgttttgaccgctcaggcgaatacccagccttatccggattccgattcttctgacggatacgataccggtttttatgcagaggcttattccggcggctacgacagcgctccggctccggcgggggaatccgcctccaggcctgttttccccacgcagtcctattttgaattgcttggccccatggattccagaaacgggcgcggaagcgtggatatccagaattggatgacggatttgaatttgtgcaggatgtccagcggttcctggaatttttcttctacggcggccttgcgtctgagctggtttaatggaaaaggagcggatgagatggatgtggaccggctgtacacgatttggctgaatgtgaacgcctcctatgccatcacggggaagacgcgcctggttttcggtgtgacgccccagatttccacggatttcgatacatggacgagccataatattttcttgggaggccatgttcttctggcaggccccttgaacgaccggttcagctatggaatcggcatcggctgttatccgcagcttggggattatcctttcctgccccttatccagtttaaatgggaagcttcccgcaattggacgcttcagctggaaggggcccgcctttcctatatcaacaaggtgagcgatgggttgaagtggggacccttcgtttccgtggcgtccggcacatggacgattcaccatgaccgccgcgtccgccagtttgcatggatttccggcgtcgccggcataggcgccgatgtggggttgggtcactggggcagcgtgcgccccaggctggtggcggatgtcggtttttccttcgggaattccggcactatcaagacaagcaacggaagccatgatttggaaaagtaccattatgaccccggtttttatttgcgtgcggggctgctatttgagttttgaccggccaacaggattagcgaatacatgacaaaggcctccggtgcgttgaatgtgccggaggccttttacatatggggacgtttgaagccgggacggttcccggaggcagtcaggcttcttcaacggagggtctgcccacggagtggtattcaaatcctacggcccggaggtttgccggggagaggatgtttcttccgtcaaagatgatgcggttgtgcatgactccggcgagtttctgcagatccgcattcgcatattcgctccattccgtggcgatgaccagaacttccgcatcccgggcgcattcgtacatgtcttccaccagtttgacccccatagggttcagaatgggggccgccgtgtgcatggctttggggtccgtagcggtgacaatggctccttccccgcagagtttttcacatagtttcagggcgatggattcccggacgtcgtccgtgttctgtttgaaggcaaggccccaaacggctatctttttgtccttgaggacccacaggcggtcccgaattctgtccaggaagtggatatgctgggtatcattgatgtgttccacttcctccaacagggtgaagggaatgcccagcgtgcggctgatgttgatgaaggctttgacgtctttcgggaagcaggacccgccgtagcccagccccgcgttgaggaagtggcgtgagatgcgtttgtccatgccgatgccttccgccaccagttccacgtctgcgcccgttttttcacagaccttggcgacagcgttaatgtaggaaattttcagagccaggaaggagttggctgcgtgcttgatgagttccgcggagttgacgtccgtttccagaatgggggcatgaatgggctggtaaacgcgcttgatgacgttcatggcctgttccgagttggctccaatgacaatgcggtcggggtgcagcaggtcgtccacggcgcatccttccctcaggaattctggattggagacaatgtcgaactgaacattcggccccgcatagtgcttgatggtctggctgactttttccccggttttgacgggtacggtggatttgtccacaatgaccttgtatcccatttctggttggagcgcctgggcgatttccctggccactttttcaatgtaggtcaggtccacggaaccatccgtattgggcggcgtgggcacggcgatgaagatgacttcgctttccgcgatggaagcggcgatggaaggggaaaattccaaccgccccacggctacgttttttttcacgagctcttccagcttgggctcgtaaatggggatggccccggattgaagagtacgtattttttccgtattattatccacgcaaatgacgtgatggcccatttcggcaaaacaggtgcctgtggtcagccccacgtaaccactgccgataattgttaaattcatagtgttagcgtaaatattggtaaaaacttaactgtatggaaaagtaagagcagtcaacccctgagcattatgggatagggaattttttctgtcaaaataaaaagttcctgattgagcgcctcctttccttgtggtataaccgtgaccagacaggaaaatatctgtttattttaatttgaacgttatgaaaacacctatcaccgttaccgttacaggagccgccggccaaattgcctattcccttctgttccgtattgcctccggcagcatgctggggccggatcagccgatcaacctgcgcctgctggaaattcccccggccatgaatgctctggaagggttggtgatggagttgcgtgacgccgcgttcccgctggttaatgaaattgtcccgaccagcgatcctgatgaagcgttcgccggcgccaactggtgcctgctggtaggctccgttccccgcaaggccggtatggaacgcaaggacctgctggatatcaacggcaaggtgttcatcggccaggggcaggccattgcccgcagcgccgccaaggatgtgcgtgtgctggtggtcggcaacccctgcaatacgaatgcccttattgccatgcacaatgcgagcggcgttccctccgaccgcttttttgccatgactcgcctggatgaaaaccgtgccaagagccagcttgcggaaaaggccggcgtccatgtgacggaagtgaccaacatggccatctggggcaatcattcctccacccagtaccctgatttcaccaacgccaggattggcggaaagcctgtgacggaagtcatcaaggatacggaatggcttaagggcgatttcattaccaccgtgcagcagcgcggtgccgccattatcaaggcacgcggcgcttcttccgccgcttccgccgcttccgcagccgtggataccgtccgcagcctggctacccagactccggaaggcgactggtattccgtggccgtttgctccgacggttcctacggcattgaaaaaggtcttatctgctccttcccggtccgcaccaccaaggatggcggctgggaaatcgtgcaggggctgccggttgatgcgttctcccgtgaaaaaattgacgctaccgttaatgaactgaaggaagaacgtgacgctgtttcctctttgttgaagcattaatgttgatttgctcttgcgccgggtttcccgttttcgggaagcccggttttttatgtcctgaagattccataaacctcattttctgcgggacagaagttttcttccgtgttaaaaaaaacgatggatgcagcatccgctagtttatggatcaggaccgcatattatacaggggagaggcttttacgctgaccggaaattccttgcgccaggatgccgcgcattgggcggaggtacagccggacggtcaggtgaaaaccatgaaaaacggccgctattccgagtggcgcatctttccggaagccgggaacgccccgcattaccggggaaattttgaagtgcttaatcaggcttacggcctggcgttgcatgaggctggagccctgcttaatgaagaagggacgttccggacgggagccaactggcctactgtgtggacccgggatatttcctattccacccatctgggattggggttgtggaatgtccgtgcctgtatgaacagtctgaatgcacgggtccggaacggggaggtggagcaggataccggcacgggcggttcctggcccatttcttccgaccgtgtggtgtgggggatggctgcgtgggaagtttactgcctgacgggggatgccgactggctgtccctttcctgccgggtgatggaaaagacatgcatgagggatgaacaggtgcttgcggccacgggcggcttgatgaagggggaatcgtccgtgctggactggagggagcagagctaccctgcgtggatgacttctgccgatattggggattcttgcagcctgtccaccatgctcctgcatgcggaggcccgcaagattctggcgcggatgttccgggagctggggctggaggagaaggcccgggagtgggaggagaagagcgtttccctggccgcggttattgagcgttttttcaggattccggaacatgtcctgtacgggcagtacctgtacggacgcgggtatcccgtactgtcggagaaggtggattccctgggcaatctgctttgcatccttctggggcaggctggcggttcccatgccgccgggatggttgcctcccttcctcatggcgtttatggcattccctgcatccatccccagatgcctgatagcgtgcccgcctaccataaccgcgccatgtggcctttcctggagggctattatgcgcaggccgcggcggcggtggagaatgaatctgccctggcgctggcggtcgcctgcatggtccgtgccgccctgttgtgcggcacgaacaaggaaaatgtccttctgaaaacggggctggatgaggggctgctgctgagttcggatagccagctctggagtattgccggcatgctgggctgtttttacaagggattgttcggcatccgtctgtctccggattctctggaattccgtccttgcgttccaaagtcttttgaaggcgttcatgagttgtccgggctggaataccgcggcatgacggtagatgtgtttctgcagggctgcgggcaccggatagcgcggtgcctggtcaacgggcaggaggcccctcccgtccttttgccgggcatgaaggggcgcgtttttgtgaaattggagctggacggcggagaagaggatgaaggggcggtgaatttaacccgcatgggcagcagcctggagtctcctgcgtggaaggcggcgcgccatggtattgcatgggagtctgtggaaggagccgattattaccgtgtttaccggaatggcatccctgtgtctcaaacggagtactgccattatatccccgcacccggccggggggacgtgtctttccaggtgatggcagtcgctctggatgggagggagtcttatcttaatgaacccaatgattatccttctgcggattcccgcatggagacgcgcccctgcggcttgagcggggatgaagtctggttttcccgcgtcacggaatccccggacgctctttgttacaatgtcaatatagataagcccggagtgtaccgggtggacgcctttttcgctaacggcacttatgatgtttcagacgggaatacctgcgccctgcgcagtctgtacctgaacggcaggcgcgcaggcacgctggctttcccccatacgtcccgttccggaaactgggagtattttatttattcaacggcagtggaaacggtgatgacgcccggtccctgccgtgtggaagtggtgtatgattccttttccgaaaatatgaatcgtctggtgaatgatatggtgataaaacaccttcggtttacccgtatatcctgatattagttcatgaatgttatgtcgaaacgtttttttgccttgttgctggtcctggggtccgggatatggagtgttcctgccatggggatggatgaggagtcagcttccagggcatctgttcctgcctcctcggacagggagggagcggagtttacccgtctgcccgtcagctggacggttaatcccagggatgccgccaatgcccgtgccgcctggaaaacgctgagcgcctatcatcggggcaaaccgaagtcttccagaaaattgcatgtggtttacgtaacgttcaaggacaggcctgcccttgaaggataccgggaacggtatgatcatattctgaagaatattcaggcatattatgcggaccagatgcaggccaacggtttccctccgctcacattccagctggatttggatgaacggggcaagctggttattcatgatgcctatgtggataaacccatgagcgagatgagcgtgcagagctccggccccgtctcccgggaagccgccaggaaggtgctggcttccaaggggattgatattgagaaggaacatgtgctggtcgtttgccagcttccggacggcgtgggtccttattacggcggcggcttcagccaccagggcacggggtggacctgtgaccaggaagggctggatcccgccagctttctggatacggaaatgatgcagggcggccgtttcaaggtgaccaggggaaagaacgccaccatttacataggcggtacggcccatgaattggggcattccttcggccttccccacacgggcgacggatggaattaccccgacgccggagcttccctgatgggccatggcaattccacctacggcgacgagctgcgccatgaagggaagggtgcctatttggcgccgacggatgctttgaaactggccagtgttcccctgttcaacggggtggagacggaacttcccgcagacgcctccttcgggcgtatgctcggcaagtatgtcccggggtcttttgaacggctggaggccattcccgttaaagacggattgcggctgaaagggagggttcatctgacgcgccccgcgtatggcattgttgcccatttggatccgcccggaggttcggattatgattccaatgccgtgggcgcttctctggatgaaaagggagagtttgatctcaccatctgcaggccgggatataagggtggttttatagaaatgcgggtggccgtattgaattgcgacagcacgcgcagcatgattactctgcccgtgtggatggatgcccggggagccaaggccccttctctggcccagatcgtttatttcggggatgttcagaatctgtggatacggggccgcacggaagaagcccggaaggcgctggcggaagtggaacgcaggcatggttcccgttctgaagtgaaagaatggctccctgtctggaagcgcgctctggggcgccaggagcccgcgctggaagttgttccggcgcagattcctgcggcaaccgccagtatcagcctgaatgactgcaagccttccgtagcccaggtggggtgggccgttccgttgtgggatgtcctgttcccgtcggatttggggcccgtgcctttcttccggacaatcggaaggccggaacgtttcattctggctcatgccccggctgtttttgcctatgacctggatgggcgctggaaagagttccgcgctgatgtggggctgcccttcggctcccgcggcagcgtcaaattcagcgtgtatttggacggcaggaagcttatggaatcccctgtgctcaaggacggggactccattcccgtgaagacggcggtagagggcggcaggaagctggaaatccgcgtggatgacgccggagacggcaatgccgccgattggggcattatagccaacggcatgctgacccggtaaatttttctgccccactggcggagaaatgtgacattaggcttgtcttttgccctttctcatagtgttctgtgggctagccatgattgggacgattgcaaagctatggggtgcggcggcgctggttgccggggcttccctgtttgcagaaacggctgcggagcagccgcccgtcccttcctctgaaaccgagcaggaaaatgccggagggaaaatggcgggcaatctgctttccggcactctcatgccgcagattccctccaatatttccattaccaatgacggcgccatcagggtggaggaatccaggaaggttatttttgaaggaccgcatgtccacatggtgacggataccggggtggaggtatttgcggattatgcccaggcggatatggaccagggcaaggtgtttctgaaagggaacctggccatttaccagggtgacggcaggacaaggaccaacagcctggtacgcgccgacagcgcggagtttgactgggagaacgaagtgcttcttacggatgccatccgtgcgaagatggagggattgattctgcgcagcggaaagtttgaatcccggaaggatgccgccggcaatacttatctggaagcccttaatgcctccgtcacggcggaagacatcagcgagcctctcacctggatttccgcggacaggatacgcgtgtatccggaagacaggttttctttcaagaacctgaccctttattacggtggcgttcccttcttttatttcccctacctcagccattcccttaatccggaagttggctaccttcccatccccggcatgcgctccatctgggggccttacctcttgaatgaatacgggttcctgatggggaaaaaatggtcggacaacggtatgccttccgcggattacctgggaaccctgcatgcagattaccgcacccggcgcggtttcgcctacggattggacatccgcgacgtgctgctggaaaaggattgtccggacatgacggggctgtccttttacaaaacccatgacaagggtgtgaaaatcaacgccggtgatgatgagtaccgtgagcatctggatccggaccggtggaggttcgcgctccagcagatgtggagccacagggtgaatctccgcacggactggcggttgaaggccaacatcaacatgttgagcgacgagtacatgctccgcgatttttatccggaaatttatcagcgcaattcttctccggacaacacggtgcttctttcccgtacggacgatacgaatgatttttcactgttgcagcgttttgtccccaataatttctacatagcggaccagcggacggagttcagttatgagcgcatcaagtctcccgtattccgttcccccgtcatgtatgaaagccgcaccagcttcgctttcctcaagcagtacgttcctccgttcatgcggacggaaatccggaacatgctggacgggatggaccccggaacttcttcctatgattactgggcccgaatgctgatgacggacagctacagcaggttccactccttccatgaggtttccgtttccaagaaaatcatgggattcctgaacctgacccccaaagtgggcggaggctatacgggatattacggcgtggaggactacaaaccgctcaaccagggaattttttacgccggaacggatgccgatttcaaattctcccgccgttattcttccgtatatagtgattcctttgggctgaacggcatgaaccatattgttcagccccattttacgctggcgtatgtcaaaaccaaccgcctgagcgagctttatccccagattgacggcgatacccccacgaccaatcccccatccttgagcataggcagatacacggagattgattccctgtccacggggcttgtcttccggtatggattgcgcaacatgctgatgaccagccgggatgctaattcccaccgctggttttcctgggatgtgttcatggatgcctatctgcatgatcccgtcaaccgtcgggatttttccaaccttttttcgttcatgcgctggaatcccgttccctggatggaataccggtcggaaatgcaggctcccgttttgggtaaggacaagatttccggctgtcgtgaatacaacaactccctgcgtttcatgccatggcgttccacggagctcgtcgtggggcaccgttatttgaatcagcattcccttctggaagacagcagccagctggatttgcgtattttgcagcgcttttcggaagcctgggctttcagcggcaagtggcgtttttctctgttggacggcaagctggacattcaggaatacaatgtgtaccacaatatgggatcctggtatttgggcgtgggcgctttcgttcgcaagaacgggaacaaaaacgaattcgggctgggcatcagctttaccatccagcagaccggggattatatgccggtcaaattcctttgatatccggaaaggacacggttttttgcggggtttttcccggaagctttttcctttttcagaggattcgcgttttgagaatggggtctgcccggtgcggggtgttgttccggagagggaaagatatgtagctggtcagcaagaggcggaaagcctacggttggaaggatggagagcggcctgtttccggcgtgccggacaggaagaaaggaagaagaggtaaggagccgctgccgcgcttgtgccggaaccttggcttgcattccggcagggaaacggggaaaatgccagggcatggagcaagctgcggcggaaaaccgtccggcttcctgcacgaataatcatacatgaatatgaacgcacaggaattgatcgagacgctggaatggcgttacgccaccaaggtattcaatccggaccgccgcattccggcggaggactgggaagcccttttggaatccctgcatttgagcccttcctccctggggcttcagatgtggaagttccttgatgtccgggatcccgccgtgcgttcccggcttcgggaagtttcatggggacagccccaggttacggacgcttcccatctggtggttttctgtgcccgcagggatttcaagccggaagacgtgcagcgctatctggaacgtattgtggaagtgcgcggtgttgccatggactccctggaccagtaccgcgcccgcatttttgaactggtggattccaagtctccggaagtgctgaaagcctggctggaacggcaggtgtacatcgccctcgggttcatgatgagctgcgccgcggatctccgcgtggacacctgcgcgctggaagggatggatccggccgcctatgaccgcattcttcatctggaaaattccccttattacacgctttgcgccctggctctgggttaccggaatgaagaggcggataagtacgcccgtctggcgaaagtacgttttgaccgggatgaagtcattctggtcatatgacgaatttttttactaatccccggtttcaagcagtcgccgcatgtcttccggcaggggagcttccgcggtgaaggtttcttcatcaaacggaaattccagccggcaggcatgcagcgcatgacgcggcagaaccagctgctcctccagttcccgactccatccgtgctggatgtattccagatagcaatgttcggacggaccgtaaattttgtcacccaggatgggatgtcccaggtgcgtcagatgtacgcgtatctggtgcatgcgtcctgtttccggaatgcaccggaccagcgccagggggccccggcgtgtattccatgtccgttcttttcggaaaacggtagtgcatgcttttccggctgggtgcacggcctgtttgacccatatgcggctttccgcgacttccccctgtcttaaaatgggggcggtgcatgctgtttccgtccattcaggccattcctgcacgattgccagatattccttgtgtatcaggcgccgctgcatggctcttcccagctccctggccgcccttttgtttttggcgaccagcgtcagaccgctggtttccctgtccagtctgttgaccagggaaagggcggctccgttggctatttcatagcttagcagggcttccacgccttccaggaggcagggttcctttttcccgttggacgggtggacgatgaggggcgctcccttgtcaaccacaatccagtccccggattccgccgccacctcaaagtgcggaaaacaggcaattggtgcttcggaaatgggaatccacatggcggatgggtggtttacagcgcatccggacggataggagcccattcccccggtttcaggttcaggctgtccagatgcagggagccgatggaaacacggcacagagataagacgggagcgcctacggcagccagcatgcggcgaacctggtggtattttccttccgtaagagtcagcagggcgcgtcgcggttcccggatttccagcagggcgggggcgcaggggcgggtttccccgttcagcgtgagggttccggaggcgaacaactctacggcttctgtcggaatgtcctcctccgtgacggcttcgtaaactttggcgacgtgatggcggggggaggtcatgcggtggatgaattttccgtcgtccgtgaggagaagcaggccggaagtttccttgtccagccgtcctacggaagaaaccgcagggttcctgttccgccactggaagggcagcaggtcgtaaatcaaatccccctccccgtcgtcatggctgcaggtgtacccttcaggtttgtaaagggcggcgtacaggccgtccgggaattccacaggttctccgtccagcaggatgccttccgcctgcaccttgtccgtgggggaggagcatggttttcccttgaatgtaatggagtggcgtttgatccaacccggcgcttccctcctggaacaatatccgtagcgggataaaagggcatccagtctcatgcggcatattttttcctaacgggaacaaaaaacaaggttgaagtatgcctccccggctgatagcattaaactattacatgcggggccgccctggtggggcgctgccgttgttcaccatttacgcttatatagttccatgattgaaacgattacagaagaacagttgactccccagcaggccgaattttgggtgcgcgcccgccaggcggtggacatgaacaattatccctatgccgtcagcctgctcaaggccctggtaaagcagcttcccggttttctggaaggccgcaaggcgttgcgcgcctgtgaaatcaaattgaatccggaggccaagagaggagggctgttcagcggcatgaaaatcagcaccagcaagcttacttcttccaaaaaggacgcggctacccagctttccgctttggaagacgaattggaaaatgatccttacagcattccggtaaacgaggccctgtacacggctgccatggaagtaaatttcccggatctggccgcttttgctctggagaccgttcgccaggggcatcccggcaacaagaaaatgctccacatgctggcctcccattacgtttcccgggatatgccggcccaggctgcggaagtgtaccatgaccttgtgaagctggatcccacggacagtgtggccgtaaagagcgaaaaggactgcatggcgcgcgccacgatgcagcagcaaaagtgggaggaggctaaaagcttccgggacgtgatgaagaactcatcggaaacgaacaccctggacaagggcgacaagaaagggctcacccgtgcggaactggaagagcgcctggggcttctctccgcccgttacgcccagaaccagcaggatctggccgtcgtgcgcgacattgccggcgtttatgaacaaatggaagattgggccaatgcctattccttctataattacgcgttcagcctcagcaacaatgatatttccctggaaaacaaggcctcggaaatgaatgagcgctgccgcaaggcccaggtggaggaaatccgccgccgcgctgccgcggagccggataataaggaacttcaggaacagcttgcccagtttagcaaggaagctgcggagcagcaggtggctttgtgccgccagcgtgtggaaaacaaccccacggacccgcaaacccgttttgagctgggccaggccctcttcgactgcggcaattacacggaagccattccggaactccagcgtgcccgcaacaacccccatatccgcatccgcgccatgctgttgctcggcaagtgctatgacgccaagaacatgcatgatatggccctgcgccagctggaggaagccaataaggaattaatagaaatgaatgacaccaagaaggaaatcctttacatgattggcttgctttatgaaaagcagggcaagaagggggaatcccttgctgcattccagcagatttacgacgccgagtacggctaccgcgacgtagccaggcgcgtggaatcctcttacggcaattagggcggttcccgttttgtgcccgtaatgggccgccgtgttcaaagcctttgccggaaacggcaaaggctttgctgtaggaaggttatttttatttctgcggacgagaaccgtaacagcttttattccggcgggcaacgtagaggggcgggagaccttgtgttttttcttgtccgttccggaaggaactgaaaaaatgaagagagagcaagctgatgcaggcattgtttacgattgatgttcaaggtgattattttacggaatgcactgcatgcagagaatcctgtgagtatgttggcagctggttaagtatggatatcaccaacgaatatgagaggatgccggatattggctgcatgggaaagattggggttctttcttatgaaattccagggagggaagtcttatgattcttttgattggcggcagcacgcatacagggaaaacactcgcggcgcagcgggtgcttgaaaaatattcctatccctatttatccattgaccatttaaagatggggttgatacgcagcgggatatgccctttctcccctgaaagccccgatgaagagctgactcccttcctctggggcattatcaaagaaatagtaaagaccgcgattgaaaacggccaaaatttagtggtggaaggttgctatattccctttgactggaagaaggattttacgcaggcctgccgggaacggatacggtatgtatgccttattttttcagaaaattatattcaaaggcattaccatgatatcctgaaccatgagaatgcgattgaacggcgcatggagagttctcccgttacgcaggaagagttgctgcgtgaaaacagggacaatcttgaaaaatgcaggttctatggctgtgactatctgttgattgacgagtcttataacgtggagatcatgttgtagagaacagaggcttcccgttgtccggggaaggaaagagaaggttattccaaattgcttggtttataggcgcaggcggtaagagagagattcttcctctcttcccctgtattttttccagaactgcccgtgtcagagcaccttggaaaaaaactcctgcagcctgggattggcggggcggtcgataacgcggtccggaggcccttcttccacaattttccctttatccatgaacaggacgcgggaagccacctcccgcgcgaaccctatttcatgggtaaccactaccatcgtcagtcctccctgcgccagctccttcatcagggagagcacttctcccaccatttccgggtccagggctgatgtcggctcgtcaaacaggatgacatccggattcatgaccagggcgcgtacgatggcgatgcgctgcttttggcctccggaaagctggaggggataggaatgcctcttgccgtacagcccaatgcgctggagaagggtttccgcatggtctgctgcctcctttctgctggagcgtcccgttttaaccggggcgatggtgatattttccagaatggtcaggtgcgggaaaagattgaaatgctggaaaaccatgcctacatgctggcggaattgattgacgtccgttccgggagatgtaatcagctttcccttgaaacggatttctccggaggtcggttcctccagcaggttcaggcagcgcaggaaggtgcttttaccggaaccggacgggcctacgatgaagaccacttcaccccggtcaattttcgtggtgacatcgttgactgccggcacggagttgaattccttaaccaaatggctgatttggaacatgggagtgtttccaggatgttcattcattgtttttcagttttctttccagtttgccgagcatccagctgaacagcatgaccacggagaggtaaatcaaggccacggccgtcagcggcatgaaggcggtataagtctggctccggatgatgtcgccgcccttggtcaggtcctggagggcgatatagccggagacgctggtctccttcaacagtacgataaattcgtttcccagagagggaagtacatttttaaaggcctggggcaggataatgtaaatcatgatttgggcatatcccaggccgaggctgcgcccggcttcaaattgtcctttgtcaatggacataatgccgcctctgatgatttccgctacataggctcctgagttgaagccgaaggccaccacggccaccaacactttgctgacatccacggagccgaagatgacaaaatagatcatgagcagttgaacgaccaccggtgtgccgcggatgactgtcaggtacagtttgcagagggcattcaggaaacggagattgcccgttttgtcatgcgtggcgcggatgacggccaccacaaagcccaccagaatgcccagcagaacggaaaagaaagagacctccaccgtcaccagaaagccgttggtcaggtatttccagcggccttcctgcatgaaattgacataaaaggattctttcaggtccagccatgtattttccagccagccccctccggaagcgtgttgttcgggaccggcagcggatttaacctgcatggccgcataagcgttccgtatttcctccagctttccggaggctttcaatgctgcaatggtgtcgttaatatcctgaaggagaaccgtatctcccttgcggacggcaatggcgtaggattcggaagtgaggggttccggcagaatttccagccgctcattgcccgctacgtacatttttgccggatcctggtcaatgacggcggcgtccaccttgcctgccgccacggcggccacagccagcgctccgttagggaagcgttccggctgctggatgttccgtgtgacgtaaatgtctcccgtggccccgtgctgcactccgattcttttgccgcggatatcttcccgcttccggatgggagaacctttgggaacgatgataacctgagcggcttccacatagggaatggagaagtccactttcctcctgcgttccggcgtaaccgtgattccggaggcggctgcgtccgcctttccggaaactacagccgtaatcacggaatcaaagctcatgtcttcaatgaccagctccctgccggtgcgccgggctacctcccgcatgatttccgggtcaatgcccaggatggtgtttccgtcccggaattcgtagggagggaaagtcgcttccgtcaccatcaggattctgccgttttccgccgctggtgcgccgcagcataggagaagccaaagcgtcagcagggccccgagatgattcagaaaggaaatggatggcatgaaagcaagggggaaaaggtgaagtctgaaccggcggggtatatgatttacctgcctgcaacgcaataaaaaactgtttcttcccggttccggtttgtcctgtctcacggcagggaagcggagtagcgggccggtcggagaggaaatggcaatgaatatgaatggcatgaacccggcaaatacccaggatttttttgtttattagcaagagggagggaatgtatcttgtgataattttcccgattaatttttccaaagggagggaggatcagacttcctgctttgagggcggtgtatgtttggttttggaaaattgtcatgcatccggaatgtgatgcatggcaaggtgcatggcggaaccataggaccggatggaataccgcgcagagcaaaaaagtttgaggccttgcagaatactttattctgcaaggcctcacgaatgggaaaatggtcgggttgacaggattcgaacctgcgaccccctgcaccccatgcaggtgcgctaccagactgcgctacaacccgatgaactcggaccgaccggggtcgtgtctcgtgacggcgaggtgtatataggaaaactttagtgttggcaagagtcttttttcatagcataccttttttgtcatgaagcaagttcaagttgcagtcgtcggggccagtggctacaccgggcaggaattgttgcgcatcctgctgaaccatcgcggggtgaagctggtgtgcgctacttcccgccagtatgccgggcagccgttgtgggaggtttttccccgtttccgtcaggttccgggttccggtctgaagtttacggattccgatgtggaggcgattgccgctactggggcggaggtcgcttttctggctctgcctcatggcgtggctgcttcctatgcccgcggcctggtggacaagggcgtgcgcgtgattgacctgagcgcggatttccgtctggacagcccggaggtgtacgaagagtattacgggaacccccacccggacacggctctgatgcaggaggccgtgtacggcttgccggagtggcgccgggaggagattgcccgggcgcgcattgtggcttctcccggctgctatcccaccagcattcttttgcctctcattcccttgttcaaggcgggcatgctggagccggaggacgtggtggtctgttccggcagcggcgtgagcggagcggggcgcaaggcgtccattccgctgctgttctgcgagtgcaatgagagttttcatgcctacggagtgccgaaacaccgccatttgagcgaaattgaacaggagctttcccatgccgcgggggaaacggtggtgatgtcctttaccccccatctgattcccgttaatacgggcatctgctccacgattacggccaaagtgaaaaagggggcggaccccgaatgcgtcggccgcctgctggaagaagcttatgccgcggccccgttcgtccgccttctggggcgcaaccagcctgcggataccaagaatgtaacgcggacgaactgcgtggacattggctgggcttatgatccccgcacgaaccgcgtgattctgatgagcgtggaggataatgtggtgaagggagcggggggccaggccgttcagtccttcaatatcatgtgcggatttgatgaaacggaaggcttgtgggttctgtagctttttgatatgttgaaagacactttcaagacgatgaatgattcatcctatattccggttgacgggggcgtttgcgcgccccggggatttttggggagcgccgtaagctgcggcatcaagaagcctacagccacgcgtctggacctggccctgatttattccacggaaccctgcgtgtccgcaggaacgtttacgaccaaccgcgtgcaggccgcctgcgtgaaggtgagcagggagcatctccggaaaggaaatatccgcgccatcgtagcgaacagcgggaacgcgaacgcctgcaccggaacccgtggggtggaggacgccaggggcgaatgccgcagcgttgcggagcttctggggctgaagcctgcagaagtggccgtatgttccaccggcgtgattggcctgccaatgcctatgatgcgcatttacccgaagtttccggaattggcgggggggctttcccgtgacaaggggcatgaggtggcccaggccgtgatgaccagcgacacgaaggagaaaatcattgccattgagtttgtagtgcagggtaaacccgtgcgcatcggcgcctgctgcaagggggcaggcatgatcaatccctgcatggcgaccatgttgtgttttatcacgacggatgcgggcgtttcccgcgatgtgctggagctgtgcgtccagtccggagtgaagagttcttttaactgcatcaccattgatggagacatgagcacgaatgacacggttctggtgatggcgaatggggcatccggcgtgaagctggaaactccggaagatatttacgcattccagcaggctttggcccatgtgatgctggaactggctaagcacatcgtgcaggacggagagcgggtgaccaagttcgtcaccgtgcatgtgacgggaggccgcacggaggatgaagctaaaaaagcggcggaagccgtagccaagtcttccctggtgaagagttcctggaacgggaacgatcccaactgggggcgcattattcatgctgtgggctactgcggagcaaaggtggacgaagagaagatagacatcgacatcgccggtttggccgcctgccgcggcggcgtgcaggcggatactccgtccgacgatttgcggcaggccgtgcaggttcccgcgttccaggtggatatcaatttgaatcggggcgagttttcccatacggtgtataccacggatttgtctccggaatacgtggatttcaaccgttccgagtatgcgtactggaaccaggcgaaggcggacggcctgacctgttaaccggttcagtcatggcgcgtggcaaatgccgccagggaaaggcggggggaatggctccctccgccgggatgctgatggaggtgcggcgccttctggatgaaggcgctttccgcgcttcccgcgcccagcgtttctgtaccggcgctgcggattgctgccggttccgcctgaccggggagacgccgcatgtaacgctgggtgaggcatgggtggcctggaaggcgtggcgcgcttctggacgcacccggctggagctgcctccggacgggagctgcccttttttaagcgggcagggaaaatgcatgatttatgaaggcaggccgttagcgtgccgcactcatttctgcgtgccggccgggggcgccttgccccgccgggaggtcattgacctgattcatgcgctggaagatattgacgcagcgctgggcggcgatggcgcgtcccggcttccggaagccgtggaacggctgtcccgaaaaggcccggcggacggaaggaagaggcggcgatgactgtccggggttttgacggctgtcaggtatctatttccgggcggggacatgttttcccgcatgtgttgatgaccggatccacgtcaaggagatgggatttcccggggaggcaggcaggaaaacgacttttcagtcctccgagtccgttttttctctttttcctgtttagaagccagatggcgcagggcgctggcggcctttttgttgccgtgccggacggctttcagataccattcttccgcctgtttatcgtcctgctcaatgccgtagccgtgggcgtagcagttgcccacattaaacatggctgtggcgttgccctgttctgccgccttaaggtaccatttcagggcttcttctcggttgacgggcgttccttttccgttcagatggcaccaccccaggttgagctgggctgttgtatgcccctgttctgcggctttggtgtaccagtggacggctttggccatgtccacttccatgccccggccgttgccgtagcaccatcccagcgtgtattgggccgtaatctggccctgaagggctgatttgtgataccacaccagcgctttgtccagatccggctccacgccgaaaccgttttcatagcaccagcccagattgtattgggccgtagcgtggttctgcatggcggcttcttcataccagtaagcggctttccgcgggtttttgggggtcccgcttccgttgccatagcaccaggccaggttatactgggcgcgggggtctccctgttccgcggcctgcttgtaccagtatacggcctgttcccagtttttccggctggggctgttggcataaatccagccgaggttgagctgggctaccgcatggccctgttccgccgcttttttgtaccacccgatggcctggtgttcgtctttttccactcccaagccgttgacatagcagaacccaaggtcaaattgcgcggtggggtgcccctgttcggcggctttccggtaccagtaaaaggccttgtcgttgtcctgaggggcgccgatgccgttggaataggcccatcccagattgagctgggcggtaacgtggcccagttccgccgcctgctggtagcagtagaaagcttcctgctggttttccgccaccccgcgcccctgttcgtagttgattgccagctggaacagtgcctgggcgtctcctttcagagctatttgctgaagggtttctacgtcgacggaataggtggagacggtgttttcctgctcgccgtggttgtgggaagcgtcattcatttcacaggtaaccgcactggggaacactgggacaatttttgctctcctgaacttgtgcgctcgccgattctgcacatttcccccataagaatcaagacccgtttttattggggccggagttcggaaagcgttaccgtccagcgcgcctgcggcgggacagggcaaggaatgaaccgcagaggaagaggattccggcgccgggttccgggattctcagatctcccagcggagcggtgaagctctgtatttcccccaggcggatgcccgacagtcccgcttcctcgtaattataactgtacacgtcgttttctccatccaggctggtcagataaatatcgcagtgggaggagccgtattcgtccgtatagtcgttcacgactactttctggcggaacatttccacagcgtagtcgtccgaatccgtcaggtagataatcagattgccgtctttgtccgtgtcgtagccccacatggtgatggcgtggcctctcccttcttccccgacggtcagcgtggttccccagttgttgttgatgctgtttgtcagtttctggtaaacgccgcttctggtgtctccttcccagaagctgtatgcggaaaataaggggttgtcaacagctcctccgcttgaggactgcgggactgtcagtcccagctctttccagtatcctccgggagctgtcgtcgtagaaaggctcggataggcggtggtatccagcatcccgccgttgacccaccagttgtaggcctgttccacggagcctccgctgtttgtccagttcgtggagatggtttggtaaatggccagctgggcgacctgcggcatgacatcgtaagtggcggatttcccgttgggcgtggtggatttcaggtcgcttctggtatcctgccaccattggagaacgttggatgccgccgccgcccagcagatattctggtcataaggaaggtacagccattctgtgggccgtgcggaaaccggaggatttaacgggttggtggggtggggcttggtcccccatgtccatttggtttttttattgcaatcataccatccgccggattcggagacgttttcaaggaatacgggcgcggcatgaagcgttccgggaagtaacaacgccgccagagccgaagagaggaaacggagagtcataggaaaaaggaatacgtaattcctttttttgttaaaaaacagggaggtcgtcaagataataaataggggaaggagacgaataaactccgggaggcagattttttcccgaagacgccgggaacgggatgtccggaggacaggacagatgagtgattttcaggggctgccgttgttaacgggggacgagccagggagaagtgggcgattccggattggacgctacatctgcgggggagccctcggccacgatattgccgccgtgcctgccggctccggggcccatgtccaccaggtagtccgcggcattgagcaggtccttgtggtgttccacgcagaggatggtgtgcccggcatccctcagacggaaaagggctgccaggagaagggccacttcattgaagtgaaggccgctggtgggttcgtccagaatgaacagggcccttttcccgtcttccgccagtttccaggacggggctttggccagttccgcagctatttttatgcgctgggattctccgccggaaagggtgtccgccctgcggttgagattgaggtatcccagccctacgtcctgcatgcttttcaggatggcggcggctctgggcagggaggaaaagaattccgccgcttcgtccacggtcagggccagcgcctgggcaatggatttccctttccaggtgacttccagcgtttccctgttgtagcattgcccgtggcaggcgtcgcagggcatggccacatttcccaggaagttcatatccacttcaatcatgcccgttccctggcaccgttcacaacggcctccgcgaatattgggggaaaagcgcgccgccgtgtatcccctctgcttggaaagggggagctgtgcgtaaagggggcgcagcacctggagcaggccggtagcggtggccggcgtggaacgcggcgttttgccgatgggcgactggtcgatgactacaaggcggttgaagtgctccgttccctgcacgcggcgcggaatatcctttttcccggaaagggcttgcctgaccgcggggatgagacagtcccggacaagggtggatttccctgaaccggaagggccggagatgcaggtcaatgtaccaaccgggatattcagagtgacattgttgaggttgtgtttgtccgctccggtcaggaccagacgctccgcaggagctgtcttgtgtccggaggcgggcatgctccgtttgcctgaaagccattctccggtggggcttccggcattttccagtatttccgcaagggagccctgcgccagaatacggcctccgttggtcccggctccggggcccatgtccaccaggtaatccgccgcggttagaatttgctcatcatgctctacgaccaggactgtgttgccctggttccgtagcgtccggagagcgcggagcaggcggtccgtatcggcggggtgcagtccggccgtgggttcgtccaggatgtaaagaactccggaaaggccgcctcccagctgggaagccaggcgcgccctttgcagttcgcctccggaaagggtgtttgcctggcggtccagagacaggtaggagagccccagctcattcaggaagcgcacgcgtttgttgatttcctccatgagcgggtttaatgccgccgccagggaagggggcgttttcaggcgttccagttctccagccatatcttccagcggaagagccgtcagttccgccagattgtaggcccggtccggcgcagacatggtgacggccagggccagaggggaaagacgcttgcctccgcaggcgcggcacggaccgttttcctgttcattcaggccggttccccggcaggaggggcatgcccccagcggggagttgaaggaaaaatggcggggagtaagctggggcagaaggaagcctgtttccggattgcggtagcgggtgtggaaggcccgggttgaaacttcctctcccggtatggtgatgatggcccgcacctcgtccggattgatacggagagctgtttgcagggaatccgcaatgcgcgaggccgtattttcccctctgacgatgaggcggtcaatgaccagggccgcgtccggaggcgggggggcgggggagcttatttcttcaatatcccgcatttctccgttccagtaaacccgtaggaagccctgccgctggaagtcgccaagcgttgctgcggggtcctgggacagcaggttttccgccggagcggccagaaccaggcgcgtgtgttccggcagggaaacgagttcctccgtaatccggtccggactcttgcgttccagttcctttcctgtctccgggtcatggggcgtgccggcagccgcgtaaaggatgcgcaggtagtccagaatttccgtgatgctccccagcagggtgcgggaactctgctgcctggcggattgctccaggcacagggccgggggcagcccggtaatgctgtccacttccggtttttccggttgatccatgccctgcctggagcgtgccgacaggcagtccagaaaacgcctgcgggattcggaaaaaagcgtatcaaacgccagggaagattttccggagccggaagggccgcagaatacgatgagcttgttggacggaagatccagatccaggttccggaggttgtgctggcgcgcgccgcggatggagatgggaagattcatgtcacgtaaggcgggtaaaggctccctggtgcgtgcctccttcctcaatgatgaggcggcgcgccgtgatatctcccaggaatttggcgtgccggtggatggtgacggtttcatccgccgtaagcgttccttccagagacccctgtatccagatgttttccacgcggatggttcctgtgaccagcaccgtcgtctttttttccaccaccatcctgcgggcgcagatagagccggagatgtgctggtccgttttgattttgcagacgccgcggcacaggaagtcgccggaagccctgccgtataagaccaggtcacggcattcgatgttcagccccttcagatctgcattggcctgcacggtaacgcttccgcaggtctgcaccttggtccggtgcgttctgctgtgtaaaatgacgtcgtccagtttgatatacgcggagcaatggccgcacctggcggaaactgccgtggcggggacggaggtgcttttgtggcaggagaagcattccacctcccgggcaggcgccaggctgctttccgcagttggggggagtgtccagggcggtgccggggaggggtggctgattttcccggagggcgcggtgctgatccgggggatgggatggaaggtggggttcatggaacaaagagggcggcaaaagaacggaccgtccttttgccgcccctgaaagtagcaggcggagagttttttattccgcgtcaatatccagcgtgctctggctggccggagcatgggtttccggctccggagcgaaggcatggacggaagccgccttcttggcggcggaagcccctgtggttcctaccgtgggggcgcctacggtagaatggccgatgaagattgctccgccttcaatagccagggaggcggcctggatgtcacctacgagttccgccgtgcttttcagttccacgcggtccgtgactgttacattgccgatgaccttgccgtggatgatgacggatttggtgttgatttccgcccggatgacggcgttctggcctacggaaagcaccccttcggaggaaatgtcgccttccacggtgccgtcaatcagcaggtcatcggaaaaacgcagggaaccgattacctccacatcggagttcagcacattgcgggtcagctgctggacacgggtggtgggggcgtaggaaggcacggcttccgcaaccggttcgggaatgtcctggctcttggctacatccatccagctgggggtggattcaggatttttattgcccttgggggcgggaacggtagtgaatgatccaaacatggcgttaaaaagagggggtgaaaggtaagatgggagctcttgaaactcgtctggtttaatgtacatcacccgcatgtggatgtgaaacaattttctccggcagggataaaaaaatgtgtctgttttttatcgttgcgctgccttgggcgttccggtagtgtgtgaccgtctttccgcgattgttttctgtggatatttccgttttgaaatgagtgatttatttgaaaaaaagctgttcctttctccggccgcgcgcaggcgcggcggaaaagcgggctttgcgctgggccgcattctttccgtcatctttttcgtgatcgcgctgggaatgtttttcggcggttttttcttctggctccagaagcgccaggcatccctggattccggagcggccgcgcggatttgcgccacgccggagatgttgtccggagaattgaaagccgctctgaaagacagggtggactatagtttctggcctccttatcacatttctccgatggaaaagcaggacctgctgcgcaactgcctggcggaggcacagaaatatctgagcgccgcggatgtggtgcaaaaatcctcttttgtgtggaagtccctgcaatcgcttcctttaatggtcaggcattacgccatgtctccgcctgaggcgattgtcagcaggcctaaggggcctaaaagctttgccgtgtttgaggtggaggggcatccctgcgcccagctcctggttggttttgaaaagactcccgatatggaattctgttttttcaaggatgaacaggatggttcctggaagctggactggcagcagtttgcccgctttcagccgatgaactgggaggattttgtacggggaaaaggggaggatattgcggaattccgcgtatggatggttcgggagcgcatgtcggaaaataaggatgactacgcatttaagctgattgctcccgggatgaacggttccgaagagcgcagcattgcccggcccatggtgtatgtccccagaaaatcggaaatgggcaagcgtttgttcatgttgtttaagatcaatgaggagatggaacattccccataccgggtgttgaacgccaatgacgaggctgacatgctccgcgcgcgggttctcctttcccgcagcaaagagcccaaccgcaagggggaatattcctttacgctggtcaggctgctgggggaaggctggtacggcctttctttcccggaataaaaaggaaggattgggccggcctcttgctttgcggaggatggggatgcgttttaccggcggtggaaacggggagggggcccttcatgtgggcgcctggggcggtggggccggaaagggggcgggcatggcgtaaggcgtgcggcatgatgtctgcggcagacgcccgccggccagaaagggccgtggtaatgcggcctggggttccatgcaggaacatggcagccgcggtagatgtccctgatgacgtaaatgggtgcgcctacaggggtataggcgtaaatgggccgtccgcatggggaatatccccagatggggaatccggaggggccatacaggaaaacggcctgccctgccgcaggtacgcggatttcgccatgcaggtgaattccggcttccgcgacgggggaagaaaaggccaggagggcagatatggcgcttccggcgcagcaggcaagaagatggtttccggcagggttgttgttcatcggttttttgaatggtggttgacggcagttatccgatagagcggagtccccgtcccgttttgtgtaattttccatgcccgtcattcagggaaggggtaaagggaataccgtcttgacctggaggggcgccccgggcaaagtgaccgcgtgacgagattcagaccatgcattgatttacacggcgggcgcgtgaagcagattgtgggcggaaccctgacgcaggatggcgtttcattgcgcaccaatttcgtctccgaccgcggcgcggcatggtatgcggatttgtaccgcagggacggtctgagcggagggcatgtgatcaagctgggcccagggaacgaccatgtggcgcgggaggccctggcggcatggccgggaggccttcaggtgggcggcggcatgacgccggaaaacgcggaggaatggatttcctccggggccagccatgtgattgttacttcctgcctgtttgatgcggagggaacgctgcggatggacaggctgaaggatcttgtttccgcagtgggcgcggaacggctggtgctggatttgagctgccgcagggttcagggaggctgggccgtggccatgaaccggtggcagactttgacggaactccgggtaacggcggagacgctggatgttttggcggaatattgcgcggagtttcttattcatgcggcggatgtggaagggctctgcaccggcattgaccgggaactggtggaaatgctgggaaactggcgccgcctgcccatgacatatgccggaggcatcagccgcattcaggatattgacgaaatagatgctttgagcggcggaaccatggatgccacggtggggagcgctttggatttgtttggcggcggtttaatcaggtatggggatctggtggccaggcagcacgggaagtccggcatggaaacggtatgaaactggctctgaaagttattcccaatgcgaagaagagcgaggccgtgggatgggaggaagatccccgtgccggccgcgcgctgaagctgcgcattgccgcgcctcccgtggagggaaaggcgaacaaggtcgtcgtccttttcctgtccgcatggctggacattccccgttcctccatcagcctgctgcgcggggaatcctcccggctgaaagtggtggaactgccggacggatgcgagggaaaacttgcccggctgctttctgcggaggatatttccggagcttaggaaagccgggcggaaggcaggcattttctttatgcgtagaagggttgcatcaggcgcggtccattacgcgtcaaacgtcatccatgtcttagcaggccgttgacgcatccggtaaaagaatttacattgcccgcatgagcgacgaagagaaagagaaaaacgcggaagcggaagagctggaggtgcaggaacaggtgcaggatgctcctgccgaggagaaggtggcggaaccttccctggaagaggaattgcttaaatggcgggataccgccatgcgcactgctgcggaatatgataactaccgcaagcgcatggtgaaggaaaaggaggaatgcgccaagttcgccaatcagcgcctgctggaagaacttctacccgtcattgataattttgaaatgggcatggccgccgccagcgcagatgcctcctccatgatttacatcggcatgagcatggtgaagaagcagctggacgaatttctcgccggcaatggcgtgagcgccgtggagcctgtggtgggaagcatgtttgaccacgccacggaggaagctcttcagcgggaaccctccgaccagccggaaggcaccgttctgcgcgttatccgcaaggggtatatgctgaaagacaggcttctgcgcccggcgaacgtggttgtcgcccatactccggaccccgaaccgcaagtctgaccgtttttttaacattcacgccacatggctaaaaaagattattacgaaattctcggcgtttccaaggacgctactgacgatgagattaagaaggcctatcgcaagctggccttaaagtaccatccggaccgcaacccggacgacccgtccgcagaagaaaagttcaaggagctgggagaggcctatgaggtgctttccgatgcggacaagagggctgcctacgaccgcttcggccatgccgcctttgaacagggcggtcccgctgcgggcggcggttatgccgggggagggttccaggatccgatggatattttcgcccagatgttttccggaatgggcggttttgcggatatgttcggaggcgccggccgcggcggccagaaaaggtccaccaagagacccggttccgatttgcgctatgatttggacatcacgctggaagaggctgcgaagggatgcaccaagaagcttgagattgagcgtctggtgacttgcaagacctgccacggtaccggggccagggatggaaaggaagcgttcaagtcctgtcctacctgccaggggcgcggcatcattacccagcagagcggctttttcgtccagcagtccacctgccccacctgccacggcaccggggaaatcatctcggacccatgccccgtctgccgcggggaagggcgcgtcagggaggattcccacatcaccatccgtattcctgcgggcgttgccacgggcagccagctccgcatcgccggggaaggggatgccggggtgcatggcggccctaccggggatctgcacgtgtttattgacgtcaaaccgcacgatattttccagagggagggcaacgacctgagctgcacggttccggttccgctttccctggctgtttccggcggcaggctgaaagtgcccacgctggaaggcgcggccaccatcaagctgccggaaggaacgcagaacggcatgatcttccgtctgcgcggcaagggggtaaaggcccttcgcggttcggacgtgggggatatgctggtggaggtggaggtggaaatcccctcccggcttaccaaggagcaggtggataagctgaacgcgtttgcctctgccctggatgaaaatcggaaccagccggcttgcgtggagtttgccgacaaggcggcgcgttacctgaagagcaaataaggtccgtttccctttttcagacatggcccgctttttcctcccgccttccgaatgggctgctcccgcctgggagctgcgaggggatgaagcgcaccatgccgccaaggttctgcgcctgcagcagggtgactcctgcatcgtgtttgacggttgcggccgtgcggcccacgctgtggtggcggaacctccgcgcagctccggcgtgctgctggttccgggggaggaatgccctccttctccccccgtggcccatttgacgctgtgccaggctgttcccaagggggccaacatggatctcattatccaaaagtctgtggaactgggggtttctgctattgttccgctcgtgacggaccgcacgatcgtgcgcctgaatgcccgggaggctgaggccaaaaggcagaaatggcagcgcatcgccttggaggcctgcaagcagtgcggccagaacacgctgccgaaagtggcgcttcccgttccctttgcggaatggctgcgcggaggaattccggaaggactgaatattatcgcctctctggcgcccggagtgcggccggtcagggaagtgctggaggccgctcgttcccgttccgtccgtcacgcttctctgctggtggggccggagggggattttacggaccgggagacggccatggcgttggaagcggggtttgttcccgtcacgcttggccctatcgttctccgggtggagacggccgcctttttcggcctggccgccatgcggtacgccctggactgagttttttcatacgcattcccatgtttaaaaatatcattttcgactggtccggcaccctggtggacgacttggccctgacgttggacgcctccaactacgtcttttcccaatacgggaaaccctgcatgaacagggatgaatttcgcgcggaattccagcttccctatccggactattatgcccgggtgctgccccacgcggatctggatgaactggaagaccatttccggtacgccttccgcgtttccaatgctccggtggaagtgctgccgaatgcccgggaattcctggagttctgccgcgcgcgcggcgtgcgctgctttattcttaccagcgtggacgccaaggagtttgatacccaatgcagggagctgggcatgatggaatattttgaagccattcatgcgggcatccgccataaggatgcccacattcataccctgctggcccagcatgggctgcatgcccatgaaaccgcatttatcggggacatgcagcatgatgtggaaacggcccatcacgcaggcatcacatccattgccgtcctgaccggctataatgacgctgcgcagctttccaaggccaaaccggacatgattgttccggacctgcttgttctgcgcacgctgatgcgccgttacgcgctcccttccgatacgcaggattccattaacatcaacggtcttgaactggataccttcatcggcgttccggacgaggagcgcgcttccatgcagaccctgaaagcggacatcactttttatccggaggaggccttgtccggactgaacgatgatttttccagaaccgtctgttatgattccatggcccgtgcgctccgggcggaggccatggcgcgcccgcgcaagctggtggaaacgctggcggaggatatgggaaaggtttgcctgaaggagttcggcgcgcggcacgtggttgttactctgcgcaagttcatcctgccgcggacggacagcgtttccgtaacggtgcatgtttcccgtcaccggtaggaaagaggttttctaccggatatccaccgccttttcttcagggatcttttttccgtctttggtgaaagtgtttttctccgccttgacgctgccggtatggcgagtgcggatggcggttccgttcttgaggtcaaatgtgtttccggtaatggtgatgttccggtgaacttccccttccggccgtggggcgtgcggcacgatctggatgacggcttctccgcattgaataaaggtattgcgggaaatggtcatattcctgaccacgccggattcataccagccggaggcatcatcttccaccaggatggcgggcatgcccgttttctcaaaccggcaccgttcaaccagcaccggcttcctggtggtaagcaggaagccccgggtgggaatgtggcggcataccgtgttgctgatatggacggatggcgtccatgtgacgttttccacaacatcatcaggctggatgtttccgggattgggatgttgcagcgtaagttctatttccttttcattgagttggttgacgccggaaacggtattggatgcataaggcaccagcgtgttgctggaaacataatcgatccggtctcctggggcaaaggcgtcaaagccgaaggtctggggatgcatgaaccggacggtgattttgttgggggccggcctgcctacaatgcgcaagtgggtgccatgaacattgatggcgtcgtcatgggaggctcccagcacgcaatccttgacgatgatttttcccctgcatccggaaaagtgcagattatccgcccaggaggagctggtgcggagggagcgggggcgcggagctatgttcaagtggctgaacatgatgttctcgcagaactgggaaacgacgcccatgccgtgcatatagtaaatatgacagttattccagaggatgtttttgcttctgtattgaaagaagccgcagcagtccctccgggtattgcggttctggtaggattggcccggtttcatggttggggagccttccttgaacgtgacgctgatttttccgggagacaactctctgatgactgttttcccggggtcgaaacggccctggaaagtgccggaggcggaatcaaaaactttggaataccctcccatgcggaattcccatccgggtccgtgccaggtcaggttcccatccttcactgtgtacaggattccgtccggaatagttgctttcatggtatccccttcaacttccgtgaccagaaattcccccatggtcggatgcaggtaatcaaaccccaggccgttcagggaaacgttttccgcatgttccatgcagacaaagatggcttttccttccagcaggatgtcggtggctcccggctttccctccaagcgtatgtttttggcttccatcaggcggacagccatggccttgggctcgttgggcgcatcgttggtgttggaaatctgcggttttccggtcatcagggcaccgtgtttgaagatatgcctgccgggcatgaaccggatggtgaccggggcctgtttggaaccttcccccatcagtgccagggagacggcatgttcccccggatggatgacgagcgtatctccccgcgccatgatgagacggttggccggtgccatgcttttccacgccgtggatggggttgttcccggattgccgtcatttcccttgtccgggtctatatgccagacatggtttcctgcggattgcgtgcgctccgtccgttccggataatccgctgccgggcatggccctgctaacattgcgagaataaaaagcagggaggccatggggttttgcatgctgtaactcctacaggaacacggttttcgggacaagaataattcttgcagggccgggagaaaaagccgcagcttttccatggctcacctgggaggcccctgtttttcatcctttctgccggggcgggaaagaaagcctaccagcttgtcataatacgctttggatttgtcgtagtaggattgggggtcaatatccaatttggtgcggaacaggagccagagcttgtggaaggtgttgacgcggtagcggatgtcgaaaatacggaagccgctcgccttcattttgtccaaaatggtatggtaaatgagcgccatggcctgagccggaataagggcggctttgtcttccgggctgaggaggttatattccctctccgcttccgcaaagaaagtttccgccagatccgcttcatatttcagcagctcctgaagccggggggagtacaccctgcagcgcaggtcttccagggtgtatccaaagcggtccatatcctccttgggcaaataaatgcggttggacttgccgcagtcttccgccacgtcccggatgatattcaccatttgaagggcatgccccaaggcaatggcgtacggataggaggcttctcccgcccccatgatgcgggcggaggtgaggcccacgcagcaggctacgcagtaggtgtagtccagcagttcatcgcggctgcggggctgctgctggcagatatccgaacggcagccttcaatcaggtgcagcatgggagtggtgtccagctccaaatcctggatgagggctatgatgtcctcctccagttccgtcagttccaggccttctccgccgttgatgacttctacccagcggttcaatgcgtcgtggcgttcgcggggagtcatgcccggttcgtccacgatatcgtccaccgtgcggcaaaaagcgtaaaattccgccatatggcggcgttcttcttcaggaagatcaatgagagcaaaggccaggttggacttggccttgctggtgatggtttgggcttgagtcatgtcttgacggaaaaaacttgcctgcgaaagggataaaaatcatggaatcaggccccagtgggaagtaaagggccacaggcagaagctggcggggcctacgatgttgtactggcggacggggccccagtaccgggaatcaaaggaattttcgcgggtggaattgtcccccagcgccacgtattcacgcagataggggcgtttgctgtcgttggacagatgcacggtccccccttccgtgatgtaagctctgccgtccagcaggctcaggggggcgggaagggccacgtagccgcagggctggtaggggggcttgccggaagcgaccctctggatagtccgttccgtggctggtttcccattgacgattagctgggagtcctgaatggagagggtatctcccggaatgccgcagaggcgtttgacgtagtgggttcctccttcctggccggtgctgcttcccttattggcgatgccttcgatgccgcgtgtatcaaagacgaagacttccccgcgttccggcttgcggaagtgataggccattttattcaccacgattaggtccccggcgtcaaaacgggcattgacgattgtgtctccgggcaggtagcttctgaacggggtgtgccgttcggcttcaaagcgcggttcctgattgaggaagtagcggcgcgtttccgcttccgctgccggaatttccagcttggagccgtcatcgaaaatcacgttggtcaccgtgagcagaagatacttggtggcaggttcgaaacggacgattttcttttccttggaggccgtttcgtgcacataggagccgccgtacaggatcatgtccccgattttctgcatcagggtgggctccccttcctggggaagggcgcggattccgttcagggagggctgcatggaaccggtcgggatgcggaagggctgaactacataacagcgcaaacccaggaaaatggccagaatcacgaacagaacttccacgttttccgccagggcggaaggaatcgctccggggatggattccagcgtggattccagtttggcggtaatggtttccgcctgctgcctgtcaccccggtaaagggccgttttcagcaggtcgcggctttcttcaaactccgccaggcgttcgggaggcagaagatcgcgattgtagttgatgtagcggcgcactgctttcagggccatacgtcctttccggcgccatttgggcgtgaaccaggccagaggatgatccagaagaaacaccagaacggcgtttgcagccggaaagcaatcgtaaagggcagctaggatggacttgtgcgggctattcatgaagtacggcattcatgatgccccgtccggaggcgtcatggaagtttattttacgttacggaagccccatttttccaggattcagcaaattttttgggtccagggcggatttgaccagttcgtgcaggtggtaggcgccttcccccacggctttccggaaccatttggccttcgccaggccgatgccgtgttccccggtaatggcgcctccgtgtgccagcacccagtggaacagcctgtccacacaggcgtccgccagggctttcttctctggattcgcataatcgtccaccatgatgttggtatggatgttgccgtccccggaatggccgaaacacgcgatgtccagccctgtttcccggttcagggcctcgcagaattccaccagggccaccaggcgcgatctggggatgacgatgtcttcgttgagcttggtcattccggttgctttcaggctgtaggaaaattcccggcggagttgccagatggcttccgcctccgcttccgtgtctgcgcgcagaattccggtcgcgccgcattcttccagcagggtgcatagcgaatccagttcctcacgcacggcgggccgcctgccgtccacttccacaatcaggtggccgcggcagccggaaggcagggcgctgtcccccagatagttccgggcggcgcggagagtgaaactgtccgttatttccagggcggagggaagatgcccgctgttcaggatgcgctgcacggcggcagctgccagcgggaattgcgggaagccggcgctgagcgcgccgaatgcttccgggtgggggatgagcctcaaaacggcccgggtgatgatgcccagcattccttccgagccgataaagaggtccccgatatcgaaccccgtcttgtttttatgggtgcgtccgccgcattccactacctctccgctggcaagcaccacggtcagccccagcacgtaagctctggtgactccatatttcaggcatctggggccgcctgcgttcgtggcgatgtttcctccgatgctgcattcctttctggaggccgggtccggcgggtagaaccatcccagagcacgggcttcccgctggagatccgctgtgataactccgggttccaccacggcaacgccgtcttccggggatatctccagtatacggttcatccgttccagggaaaggctgatgcctccgcgcacgggaacgcaccctcctacgtatcccaccccgccgccgcgggccgtgacggggatgttcatggaggatgcgtagcgcagcaacagggagacgtcctccgtactttccgggaaaacgactgcctccggcagcacggaggcgtaccatttgtccccggcgtgcgccgccagcacatccggggctccggaaactttttcaggccccagaatgcgggaaatgtcttctttcaaagacatggattatttgagaatgggggtgcagaagcagtccgggcggtggaaatccggattgccggaaaggtcgtccgccgtagtcaggaaaatctggtccggagtatccaggatgaacgtggctgccagcttgcagtcgcggatgtccacgccgcgcagttcgttcagcggaatccgggccatggcgcaccatccctcgtccgtcagaatgcacttggtatccacggccagcggagcggggatgtcctcattggcgcggcgggtatcggaaaaggcgcaggcccaccatgcgccgttgggcgcaaggttgaattcccagtaattggtgccgtctcccgcggccatgaaccattccgccaggtcgtaccgccatagttccggctggaactggccgggacgggcttccggatggatggtggctgccttgctgcgggaagccagaaaccacaggaattctccgtccgtggcgaaggcgaattccgcacttggctccacatcatagccgaaccagtcgttgacgagttcctggcggggcagggaggcaagctggtcgaagcttccgttgaaggcccattggtgaatgattacttgcataccaccacatttggacagttttcaggttttatcaagccagaacgtcttacaggcttggatattgacgtgatttctccatcatgggggccgtcatgcattttcaaaggacgctgaatcggttttcccgcgaaaacgttcccgggtatctggctgtgttcatcggcggtttcggggacatgtttgcgggttgtttgagccgtgtggagaaaggatttcccggttttttgccgggtgtggcgtacgcaacggcttattaccactgggacggaggcggctgcggcgtgttttttgacaggtgcggaaaaatagcggtggagctggaagagctgagacggagatatcccgggctgcctgtcgtgttgataggacacagctacggaggctcctgcgcggtggaagtagccaggcgccagtcggttcaggctgctcctctttgcctcctgacggtagatgccgtggcgcgcaggcaaaagagcgtgcgtccggcctgtgtggaatggtgggggaacgcttacctgcgggatggcggcggcttcatggacgcggtgcccagaataggcggacgctggggacattgcgccggggctgatgccaatcttgctttttccggctacagtcgtgaccgggagggccgcttttattctcaccggcgtcctgcgcccatgctttatgagccgcctggggaagaagcatgcagcctttttcaagccgctgcctcctggctggaaagaaatcttccggactgaactgccggagccgtgctaccagttcagttcatcccacttcaccagttgggaaagaagttggctgataaggcgttccgtctgttccctggctttctcttccggcactctgatcttgtccccgtacgtggtggaaatttggaaatagcaccagcgttgatccatgccgtgcagaaccctgtctttcatatccatcagggtgcggatcaagtggtcttccgtcatgtggcggtggccgataaatacgtaataatgcatactgtccagaatgacaggttgcggatggtccggagcgatgttctgctgggatttcagcttggtcattctgatggttccgcggccttccacgggaacatccaccgtggtccccgtcaggttaaaatggccctgggccgggaggcagcgttccggacggtggatggagttgtttaaatcatgaccggatttcacgatggaaacgcggcacagaacgggtacggtttccgtcgcatccagactgatggggagttcctgcacgtaatccgctttggaaaattccgtatccggggccaggatgccccgttcctgttcggattcctgccggcgcgtgccgtgccagccgtacggattcatgcctgtggggagatccatgctgatggaggagtcctgcacttcccccctgcgcggcatcaggtaagtgccgccgagcatgacggccagcagaaaagggatgatgataattttgagcgttttaatattcatggcggcggaaacgcttaatgggacttgttcattttaacaaccagcttcttgcgctgtgacggcttccagatgagctccccggccagcagggagtggacggctgccaggccgaaaaggctgatggggaaaaaaaacagcaggccggaccagtcatgccaggtttttgacgcaaactcgggatttccgtattccgccatcaccacgatgctggtgatgcggacaccgttgccgatgacggccaggggaatcgcgctgaggaagagcacgcattttttccagaatttcaagtcggacaggtaggcccaggctgcggacagcatgagcagtgccatcagggagcgcatgccgctgcaccctcctgcaatattgaaggcatcccagtgtccgccggtagagcggatattggtgccctgcagataggtatccaccccgaagatgcttgccccccaatgccccagctccgtcgcgatgatttgaagtcccaccgtagcctgctggaaggagggcagggggatacacagccagaaaaagagcagcgggaaggcgcacagcctggcggtctgcggtccggccaggtaccaggccccgctcagtaaaatcaggggaagagcgcctacggccacgcgaggctgccccacgcggaaggaaagcatcagaagcatgatcgccgggatgaaaagaatcaggccgcgccagtccatgcgtctgggtgcctgggcaattttctttctggcatggtatagcatgaagacgatgatgggcaccaccagccagccgtgttcataatccgtttgcttgttccaggaggaaatgagccactggatgctgttttcgtttccgaatgaaccgaattccgggaatgccagatagttcagtgccagcagcagcgtgctcacgaccagggcggcgatcatgggggcggtcagaaatctctctttgccatcaggagcgggggaatccatcatggagaaaaatcaaattgtgagaattaagtattgcgattatgcggacctgtgttcagaatgcgtccgcttttcagtttccggtatgaagattatcagcggtacagcacacagagaacttgcggagcgcattgcgcaaagcgtaggcattcagttgacgaacgtcacggtgaatactttccccgatggggaaagttttgtaaagataaatgaaaacatccggggcaaggatgttttcctcattcagcccacctgcccccccactaaccataatatcatggaattgtgcgtgatggtggacgccgcccgccgcgccagtgccggacgcatcacggctgttgttcctttcttcgggtatgcccgccaggaccgcaaggaccagccccgcgttcccattaccgccaagctggtggccaatctgctgacggccgccggagtggaccgcgtgctgactatggatctccatgccgcccagatccagggattctttgatattccggtggatcacctgtacgccgcccccgttttaatccgtcacctgcgcgaacattatgttaaagacctcaagaaactggtcgtcgtctccccggacgtgggcggcgtgaaaatggctcgcgcgtattccgacgctctgggtgcggaattggccattgttgccaagcaccgcgtcaacgccacccatgtggaagccatgaatgtcattggtgacgtggaagggcgcgatgctgttctgattgacgacatgacggagaccgccggcaccctgtgcgctgccgccaatatcctgaaggaacggggagctcagcgcgtgttcgcctgcgtttctcatggcgtgcttggggacatggcccgcgaacggatttccggttcctgcattgaacgcgttcttacctccgacaccgttcccatggcctatggccccaaagtggactgtgtcagcgtgggagacctgctgggccatgccgtgcagcgcatacatgacggagaatccgtatcatcattatttgacatttagacaattttagtgcagagtcctgcgccctgacctgagtaccggtttacgcgggttcggaaatcccggcggggcctctgcctgaacccgattaggaaacatcatcaatcaacactcaatattgcctctataaaacatggctacatcccattccctcaaggccgaaacgagagcctgcggctccggtaatctgaagcaactccgcagccagggcctggttcccggcgtggtttacggtcccggttttgacaacgtcaatatccaggttgacgcccgtgaatttgcccgcatgctggcttccgccgtttccgaacacatcctcgtggccttggatatcaacggcaagatcgtgaaagttctccttaaggaagtgcagcacaaccccatcaccaacgcctgcctgcatgtggactttcaggctgtgaccgatactacggtcatccattccattgttcccgtcattctggaaggcgattccgccggcgtggccctgggcggcgttctggaccagaccattcacgaactggcgattatctgccaggtgaaggatctgccggaagccattaccgctgacatctccggtttgaaactgggtgaaagcctgcgcattgccgatctcaaactcccctccggcgtaaccacggaactggccggcgatgtgattgtggctattgtggaagctccccgtgtttccggcgaggaagcggctccggctgctgaagaagctgttgccgagaaataagtttgatacgcctgtttcttcttttaccgggtccggagccgtttttgcggctccgggcttttttttgtcgccaacagggcatcttttggtaaagtgcaggatacgtatttgcctgatcaatctggaaaaagccttagatttatgaacaagtccctcatattggtgttgaccgcattcgttccgcttgcagctgcagatgaagtaaaactcaaggatggaaccgtttacaaaaattgcacggtagaagtggaaacgccggaaagcgtcaacctcctggttcccgtgtccggaggtatcaaggattccgtaaccgtgaagagggatttgattgaatccatcaggaaggcgactccggatgaactggaggctgcccgaatcggcaaaatgtatgccaaaccggaaaccatgaatgccggggatttggaaaaagccttggcggacctggacaagaccattaagaaaaatccccagggccttgctcatgacgccgccgtcaaggcaagagccaaagtagtggttttgctggaggaaaagaaattgacggaggaagcccaggccgcccaggatgccagggaggaggcggaagtgaccgtgcgcaccaaatacgaccatgaggccaataagctgctgaagcgtttcaaggcgcttgccgtgcgcaatccataccaggccatggccgtgtatgaccgcttgcgcgacggttatcccggttccgccgccctggcggatgcctatccggatgccgccagaatcgccggacagctcaaccgtaagctggaggtcatgatcgccgccaaggaaaagtccttggagaaggaacgtgaagccctgagaaaggaggaagagaagcgccggggaaatcccaaactgaccaaggaacagcgccaggtgttgatggatgctttccagaaaaggcagactgccatccgggaacgtgaaaaccagctcacggaagtgtaccgggctttgcgcaagaaggtcaaggaacgcggggaccggtggtttgaacctacggcaggttctttggaagccatgagagaccttaagctggtagccgctacggatgcggaacgcttaaaaaaacaggacccggaaaacggagccggttccgctgcgctggaaaaggcctggaatctgtgtgacgagaaaaaatttgacgatgctatggaggttctgacggaactccggaccgcccaggttcccagggaatactatgaggaactgacggaaacggtacgcgtggggttgcgggaacagcgcgcccgtgaacgcgccgaacgtgcggaagcggcgcgcaaagcccgtgaagaccgggataagaagcgccaggaggaaagagaagcagccgccaaggccaaaaagaaataattctgccgttttccggagaaactctccggagaaatatggcggaaatggcgtttacggatgggatggatcaagtatgtgttgattccatcctgcccgtcaggctttccggccgttgatttcgcgcaattcgttgtcggagattcctgaggttttctgtcggagcggggccggaggcgtgttcctttgacggtctgcatgtttttgcggggagaagagggcaaatctttccccatgcgatatttcctgctttcttccgccgcgtcttcagtatagaagtgttgcatgaggaacgcttcttgcaaacgggtcacgggtgaaacggacatcagcatggaactgaacctggacggcacgggatgcgccgccgtcgcaacggggcatgcgttttttgaccatatgctggatttactggcccgccattccctgatggacctgacccttcaggcccgcggagacctggaagtagacgcccaccacacggtggaggatgtgggaatcgttctgggggaatgcattaaaaatgcactgggggacaaaaagggcattgttcgctacggctgttcctacctgcccatggatgaaactcttacgcgcgtggtgatggatttgagcaaccgtccgtatgtagctttccgtattccggaaggcggtttgccggatgcccccaactttccgctgaccctttgcgaggaattctgccgtgcgctggccaataacctgcgttgcaacctgcatgtggaagtgctttacggcagggatggccaccacattgcggaatctgtcttcaagggcatcgcccacgcgttgcggcaggctgcggcgattgacccccgggccgccgggacgctgccttcaaccaagggaatgctgtaaaatacatgaaacttggcgtgattgattacggtgcgggcaatctccgcagtgtgctgaacacctttgaggccgccggcgtgaccggtcatctggtgcgtactccggaagatgcggcgggcgtaacccatttggttcttcccggcgtgggcgccttcggcgactgtgcggaaaagctgcgccgccagaatctggtgcccctggtccgggcatggatagagcaggacaggccttttctgggcatctgcgtgggctatcaggttctttttgaaagcggggaagaaagcgggcaggttcccggactgggcatcctcaaggggcgcgtggttcggttttcagaatcggaactcaaggtgcctcacatggggtggaacagcgtggctctcactgatccctccgatcccatctggaaaggcatggggaaggaaccgtacttttatttcgtgcattcctattatccccagccggaggataaatccctgattgccgctttctgcacctacggcgtgcgttttgctgtcgctgtcaggcgcggcaatctggtcgccacccagttccacccggaaaaaagccagaaactgggcgtgaaactgctgaaaaactttatttccctgtgagccggaaattgccggctcacagactgccgctcttttccctgacagcaaggggcaaggaggagcggtgaatcaaatgaaacgtcattctcgaaaagcagccttattaaaaagacaccgggattaattcattgaaacccttcggacggcacctccgtagaactccatggctcagtttttccctgtatggaaaaatttccgctgtatccgtaaaaatccacaagccgaactccatggctcagtttttccctgtatggaaaatagccagggcaagcggagtggcaaatttatttcttaccgccggttcctggtcaatattgcttaaggggcggggaatatttgttgagcgggggggcagagggggaaagggatggtaatctataaaaaaagaaccgccccttcacggagacggttctttttgataagaaagcaaggagcggatgtttcgtccgcatgggccggattttagccgagcaccttgtaatactgaaggtgaatctggggattcaggcgaaggcgttcgcggatgggcctgatggcggaaggttccgcagagaacgtgtaggtcacatactgcccggcggaaaggtggttggattcgtaggcgaattcgcggcggccggcgttttccgtggcggtgatgtcggcgccttcttccttcatcgcggcggctacggtgctgatcaactcttcaacgggagtttccgtacccttcatgttgaatacgataagagcttcgtaatttctcatggtcttgtgataattagaaatgtgtcgtgcgaacggtgcgcaccttgcgggcaagtaaggtgcaatgattgtcttcagaaagcaagcctattttttaccttgtttccgggaacatgccgtttcctgcgttttactctccccacggcgcggaagaattgttctgcatggcgtttcctgccggcggcctttgctgtaggagagacgattccggcgttcgcttggcgggtgccgtacggaaaagagtggacgccgcaacttaggatatgagcttttcccgggtaaaggattccttttcctgcaaaaaaagggaggaactggcgggaggcagatccgctggagcggttgctgccacgggctgaagggctttgttcccctccggaacagctttgtcttgcgcagggtatggcgggaagagctccggaaagaagaaaaacgttaacgcgtctgcgccatctgtacggccagctggaaagcgtggatggtgctggatggattggcctttccggttcccgccaggttgaaggcggtaccatggtccgggctcagccgggggcggggaaggcccagggtgacgttgacggcggtatggaagtccaccagcttcagcggaatcagcccctggtcatggtaaggggccagcacggcgtcataattcccttccacggcatcccggtacacgcagtccgggacggaaggcccgtcaaatgcggcatccggatggatcgccctcagccgttctacggccggggcaatgatgctcccgtcctcatcgccgaaagcgccgtgttccccggcgtgggggttcagggctgccagggcgatacgcgggcgcatgattcccttgcggatgcagaagtctttcagcagggttccaatgcggaccagttcctccgtttccagcagggaaggcacgctttggagggaagtatggatggttgccagccccaccgtcaaccgtttcccggtcaggcacatggcgtaattgtccgttttcaggcgttctgcaaagaattccgtctgccccggccagcggaaacctgcctcatgcagggtttccttgcagacgggggcggtgacgacagcgtcaaccgttccttcccgcagggcatgggccgcctgttccagatggtcgaaggcgtgtttggcggattccgcgttaggcctgcccaggggaagctccactctcttgccgatgaggcggtattccgcgtcttccgggagttctccggaggcaagcgcggcgaaaatgacttcagggcctatgcccgactggtcgcccagcgtgtatccaatgaccggtttcatagtgcggcaacaggagggattataattccgcgggttccggcattccggcagcggaagcgggaatttcttccgcggaggaaattggagttttttcccccggaacagcctgcagggctgccgcccgtttttccatgttgatgacctgtgtcgttttttccggttcgtcggggttgcggagttcgaattccaggtgggagttggtggaccagtggtaataaatggtggcgccgagggctgccagcaccagaatcaggagaatggaaccgaagaaggagcgcatgcctctactgtgtgccggaggaaaggggaattcaagaaattatcaagaccgcctgcgtgggcgggcaaacgccgttaactgccgtgtatcttcatttcctgaaagaggaaggaagcgtaagtaaaaagaggcagcccggcatgagaagatccaggacagttcaggacaggattttcatcgcgaggaacaggagcatgagcaggatggcaaagccgatgattctgcccgccatgctgtcgtctttcccgtcctggatgcacatcgggcagttttccgggccgttcatgccgctgcatcccatgccgcacgcgccgcagggaaaatccgcctcccgctcctgtactcggtcttggagaaggagttccagctcgtgcacggaaggttccacgccatagacgacgatttccccgtcaatggcgagtgcgggaagcggcgtcccggtctgttccggaacggtctcctcaacctgcatctccggattgacacccagatgggccaatgcctggagggtattggcgcgcagggtatttcccgggtaggcccggctgtaaaaaagctgaatcctggtcatggagctgggtatgtcaggaacgcttccgtttgggaagactcttcttccaacaaataggacgggcccccaaaggtcaatgcgtttttccgtgtcatgacatataagtgttgtacggaaaacattttagacttttcaaatgaggagggaacgggcactatcccgccggtcccgccatgaaaaagctatctctattccttttgaccctggcctgtgtattccagttttccgcccaggcacaggaacggcccagttatattgccattgaggccaattccggcaagcttcttttcagttccaacgcagaagaaaaaaggcccgtggccagtctttcccaagtagccaccgccatggtggctttggactgggtggcccgcacgcggttgcctctggatactttcattgccgtgcctcaggaagcgttcggcctccgtgcgggcaatcccatggatctccagccgggagaccgcctgacgctccgggacgctttgtattccaccctgctgggttcggacaatgtttccgccctgactgttgcctcctttgtggggcgtgacctggtgtcccgccggggcggcggcgcccccattgccgcttttgtggcggaaatgaacaatttggcccgttccctgaggatggccaaaacgcactttaccgctccccacgggctggacgccggcaactccgtttccacttcctgcgcgctggatatggccttgttgggcgtttacagcatgcaaaatccggctttttgctacattgtttcccaggcgagccggcgcattgaagtgcagtcccagaccaagggcaggacgatgtatgatatttccaacaacaacaggctcatgagcgcttccggcgtggacggcatcaaggcgggcacttcccgcgccgccggcccctgcctgctgctcagcgtgacgcgcaacgctatttcccgccggagcccccaaacggggacggaggtgatttatccgcagcgcatgattattgcggtgcttggttctgcgagccgctattccctcgccagggagatgatgaacactggctggcgcgtttgggaaaactggcaggcttccggcatggacatgaaggaccccaaggaatttgtccagcttcctgtgaaatctgctccacaaaggagataggaagtagacggggaaggatttttctgctataaggaacgccgaatatgaacatcggtgttttgaatagcgggggtgactcccccgggttgaatgcagttattgaaggtgttgtgggcgcggcttcccgtcgcggctggaacgttgtgggtttttacgacggttttgaagggcttttgtccgaggaaggggacgaacggtttgaatggctgacccctgccgcctgccgcggattgcgagccaaggggggcaccattctgggaaccgtgaataaaggcaactttgctatcaaggtgggcgtggaccaaaagggggcgattgaacccgcggtgctggaaaaaacgaaggctactgtccgccggctggggctggatgccctgatcgttgtgggcggagacggctcccagtccacggctcttttgctttccgagatagggctccccgtagttggcgtgccaaaaaccattgataatgacctgggcgcaaccgatgtcacttttggcttctacagtgcggtttccattgtttccgagtctttggaccgtctggaaaccaccgcgaacgcgcaccagcgcatgatggtggtggaagtgatgggacggcatgcgggatggattgccttggaaggcggcatcgcagggagtgctgatgttattcttctgccggaaattcctttttcccttgaaaacgtggtggaatgcatcaaggcgcgcaaggctgccgggcagcgggaaatcctggtagtggtatctgaaggggcccgtctggcggacgaactggtattgctggatgaaaagacccagggggaagttcgcctgggaggcatcggcaaggtgattgccaagaaactggaagaagctactgggattgaaactcgctcctgcgtgctgggccatatccagcgcggcggttctccctgttcctatgaccggattctgggaacgcggttcggcagttatgccgtggaactggtggaaaagcgccagttcagctgcatggttgctctccgtgggacgcagatgactgccgtacccattgaggaagctgtgaaaaccttgaagctggtggatcccgattgccagctggtgcgcacggcccgcgatttaggcgtatgcttcggggactgacgttctccgtctgagtcacgggaaattgattgtacccgatagggttttgattgcctttcaaccgtatcctggaatcaggatacggtcattttttgcggaagcacgccgtattcattggggcctggcgagcttttaagaagcatcatggacaggaagaggatggaaagcaaatccatcaggctggacaccattcccaggtagtccagatagagggccatatcttccggtaccaggcgcagcaggaaaatcagcaggaaagtgacgatgaaaataagaatgggaatcaggatgaattttccgctcagattgctgtcatgcaggcggcgcacggcgaccggcagattgaagaggatattgagccccgccacggctgccagaagctccagggaaagcatgctcagctctccggattggtagaaaaagtaaaaggtgggattgaagcaggagtgagccagcaggattagagcgtcttgcggatgggcggcatataacaggatttggagggaaggagagacgtaaaaacccgccggctggctgtcaacgtctatcatgctgtagcccagcggaaggaataggaggacggaaaggaggaaaaaggaccagaattctgtccgggacgcgcggcctgccaccgtattcaatttccgcaggctgatgagccagtaaaggtaaaacggagtcaatggctgttttttcagttcttcggcaggggaatcagccggttggggctccggacggcggctgtatttgttgccgtccgccttgctttctcccagcgtcagataaaaaaagatcagatgccccagcccgaagggaatgaaaagggaaaaaagccagagtccgctcctgccagtatcatgcaggcgtctgaacgcggctgatatgcttgggatgaacaacaccgcccacaagaggatggttaaagcgtctccgtagatgctcagtcttgtatcagggatgtgcagccagtccgtcaggatataccccgccagggctggaatcaacgccaggaggggaagagccatgaaccaccagaattccgcacgggaagcgcagccccgaaagtccgcataatgacgaaaaccttttttccagaaggagaggggagaagggagggaagattcctgcgtggaggttggaggaacggaggaaacagcaggagaagcaggagaagcaggagaagcaggagattccggcatggatgagaagggggtttccgtttagactccctgatgccggggaatgctcaatgcgtctgtgcccaggacatggaaattttcctcctgcagccggttcagatcaggacaatcgccatcagcagcattccggcgatgatgcccatgatggaaatgtgatgatgcccccagcgttccgccatgggcagcagttcgtcaaaggagatgaaaaccatgatgcccgcgacggaggcaaagagaaccgcaagtacggtaggtgtgaggaagtggaacaggaagaacatggcgatggctgcgcccaccggttcagccagaccggagagaaaggaataaaagagggcctttttacggctgcctgtgccgtagtaaagaggtaccgccacggcgattccttccggaatgttatggacggctacggccagggcaatggaggtgcccaaagtcagggagtccaatccggcggcaaaggtggcgattccttccgggaaattgtggatgccgatggccagggcgaacagaatgccggaccttttaattcgggatgaggaaaattcaccgctggcctgtccatggatgtcttccgggccgcgcgcttcgtgcgggttttcgtcttccggtaccaggtaatcaatcagagccgccacggcaatccctccgaagaaggaagcaatggcgatccaggaacctgccgtatggccttcgaactccatcaacctgtgctgggcttctcccagcagttccaccagggagatatacaccatgactccgccggataatcccaaggcaaaagtaagtgcctttgtatccgtccttttcatgaagaaggcaatgaagcctcctatgccggtagcaagaccagccagcgtggtgagcaggaagacaacgaggatgtgatcggcggaaaggtccatgcgtgcacctgccgggcagggatgaccccggcagtaaagaaaggggtgtattattttgcgggagccgtgggaacgatcatcttcgtggcccggatggcgccggggggaagggggggctcttcccccggcttcaggaggccccgttccttcttgatttcaggcagcttgtccagaagtttgctgaacgcttttccttcaaaactttttgggaggagcgcaacgccttctttgagaggctgttccaattcattgaccctgttttgctgcatgagcaggtacactttttgcatgagaacagcttgtttgacttccggaagaagcccgttctttttcaagtagctgtccatgatggaaagcgcttcatcaggattttgatccgccagaatgtggatgtttttcttccggaacgtatcggcccattccaatttctgggcatggagcagatcgtccctgtgcagtttggcgagaattccggaagcgtcctgcgggtccagtttttccagttctgccagagccggcttatagaaagtgcggatgctggattggggaaccgttttcagcaactgaaccagcgtgtcccgccgctgctggtcagtgagcttttccgccagattgtttgtcagggactgctgcgtgttgagtgcttccgccgctttttttgtatcctgcatgacctgggcaggattggcgtaacctacgacggtgtggacgggccgcccctgggcatccgcaaacaccagcgtggggaatccggtgatgccgtaggattttttataggtttccagagaagtttttgtctgcgcgtcctgctgctttttacgtgggtagtccagttccacgggaataaaggaacgggaaatggctgtctggatttcaggaagggaaagagcctgctttttctgcatgatgcaggctccgcaccagtcggaaccggtgaatcccagcattactcccttattctgtgcggcggcttgctgcatggcttccgcagggctggtactccatgtttcggaggcgccggcactccaggcgaggagtatggctgcgaggggatgtatgattgttttcatggcaggaatgtcattattgcatggggggaagcggagaatgggcggggggaacccacatgtttccggaagaggagctgccggaatctccggtgtgggtaggtgtttcaattttcggttttccggcgggcgggtccagatcttccaccaccactttctttttggcgggctggggcacgggggcggcagccggggccggtgagggcgccctgcggataacgggggatttgagggaagcatccgtctggttcatggccgtaatattcagcgggtcgccgtaggccagcatttcccggatgtcgtcaggaagatctccggcaggaatggaggtgcttccctgttcgtgcatgatacgcacgaattcattttccacgcgggtgatttccacattcaaataagttttgcctgaatgggatgtcttcagaatgtcgaacttgcggccgcgtgccttggctctggcgtgttggcggtagcgttcgaagtaggagcggatttctccccggatgccggctacgcgcattttctctttctcaatggatttttgcgtctcttccaggtcggaggccgtatgttcaaagatatccaaaaggctgagcagctgttccttgggagcggtcctgttccgtatttccctgagctgttcctgcttcttcagcagctgggcatgattgtcctccaaagcttcccgagcatctttgacagggtctggaagctgggaaaatttttcataaacaatatagccggcactgatgacgataagggcgaacagccccaggcagaggttccagaaaagagcgtctcccctggctttccgttcggaatcctcctgccgggcggattcttcttccgcagcgtgttccgagacgacgtccagggaggttttcagacgttttttagctgcgggagcggagttttcatccttgtgttctcctccgttctccttcggagcaaagcgggtttcgtcttccgcaggggggagagtttcgccggacggctgtctgggagcgggggcgtcggtcatgggatgcgcgggaatggaggttagtctaccgggtgggtttgtttgaattcagccagtttggccgcatacgcgttatattgatattgcagggcatggaattcctgcttgcgctgcgccagcgttttgcgcatgtcttcaatgtcaaagcacaggtgctcgaagtcgcggcgtttggaaggcaggacatctatatccttcaccgtgaagggcgtcgtgattcttcccgggttggaaagccttttctgaagattgtaattaacgcgggcatcgtgggattccgcctggcttatttcctgttccgtctgggccagtgcgtttttcatttgctggagctgggcctggagctgctggtgttcctgggatgaattccccgtcaggaaggaggtcagggcttcattcgtactgctgtcgcacgaagtaagggccagcgtgagggccaatgccggacaggtacgcctggtgaatctcacgatgttgaacatgccggggattatgaaccttaacggaggggaaagtcaaactgttcatgcgccctccggaacaatgatttttctcgcataaaacgcgtatgcggctacaatgcccgcggcatgatgcaattatcggagatcggaggccatctgacggccagaacgggtattgatgatttgatggaggatttgttcaaggccctccattcgggagacgccggcctgtgccagttgaacggcgggagccccgccgttattcctgaggtgacggaactttggcggcgcagcatgggggaactggtgcgaaatggcaaatttgacgtgctggtgggccattatgcccatccgggcggggatcctgtctttatccgtgccctggtgtgttttctcaatgaacgttgcggatggaacctgacgccggaaaatgtggcgattacccagggcggccagatggcctgctttacactgttcaacatgctggcgggcccgtgcccggacggtgctgtgcgtgaaatcctttttcccctgtgcccggattatgtgggataccagtcccaatccctgtgcggcggcgtcatgttccggggcatccggcccggcatccgcatgctggacgggcacacgttcaagtacgtgattgattttgaccgtctggacatacgtccggaaacggccgccgtctgcatgtcccggcctacgaatcccaccgggaacgtggtgacggatgaggaattggggcttctgcgggaaatgacttcccgcgccggggttcccctgatgattgacaatgcttacgggcctccgttgcccaatatttgttttgtgcccgtaaccccggcctgggatgagaacatgatcctgaccatgagcctgtccaagatcgggttgcccggaacgcgcaccggcattgtcattgcgcgcccggagatcattcgtgccgtcgtgagcatggtgaccacgtcatccctgtgcccgaacaatctgggccaggctctggtgacgccctatctggaagacggcactctggagagagtctgccgtgaaaccctcacgccgttttaccgtggccgggcggaattcgccctgtccctgctgccggaacttttcggagaatccatcccctggcgcgttcataagagtgagggcgccatgttcctgtggctgtggtttgagggattgcccatcacgtgccaggagctttacgaacggtgcaagtcacggggctgttttgtaaatcccggccatcactttttcttcgcccttccggaggagggggaaccctggccgcaccgtcatgaatgcatccgtatcagcttcacccagacggaggaactcctgcgcaaggggctttccatcgtggcggatgaagtgcgcaaggcctactcccgttcttaatccaaacctgacccgtatccatgaacagcatgaccggcttcggcagagccgccgcccaggcagaccgttataatatccttgttgaaatatcaggcgtaaaccgcaaacaaacggaaattgccgtcaatgtgccgcgcggctatgcggaatgggacgcctccgtgcgttccatcgtgcagggggctgtttcccgcggccgtgtaggcgtctccatttctgtggagcgtctggaggaagcggatggctccctccagcttgatgagcagaaactggcctccctggcggagctgctgaaccgtgcgtctgacctgacaggtcaaccgttgcccctccaggcgtccgacctgctgaggctggatatcgttacttccgcagcggaagcatccctttctccggaagaagcgtggccgatggtggaaaaggcgctcaaagccgccttgaaggattttatttccatgcgtgcggcggaaggtgccaacctgaaagcggacgttcttggcaagctggatgtcttagagcaattccgcctccgtatcgcggaacatgccccttccgtgcctgtcaggcttcgggaggccatgctcaagcgcttggctgatgccgacctgtccgtttccgtggacgatgaacgcatcatccgggaagtggctctgtttgcggacaagtgcgacatttccgaggaaattacccgtctctcttcccattttgaccagttccgcaccttgtgcggttcctccgctcccgcgggcaggcctctggatttcctttgccaggaaatcttccgggaattcaacaccatcggctccaaggcgaacgattccacgctggcccatctggttgtggctgccaagacggagctggagaaaatcagggaacaggttcagaacatcgaatgacagccatgaaacagccattgggaacattgctggtggtatccgggccttccggttcggggaagacgacgttgtgccgccgcgcgacggaaaacggtctgtgtgtgtacagcatttcctgcacgacgcgccagcccagacccggggaagtcaatggagtagattaccatttcctgactcccgccgaatttgacgccagggtggagcggggagactttctggaatatgcggaggtgcacggcaaccgctacggtacgctgaaagcggatattttgactcttctggaacaggggaaaaacgtggtgatggatattgacgtgcagggggctgggcaagtccgttcctgccgggagggcattctacccctctgctatgcggacgtttacatttatgtgccgcaggcggagcttaaaaaccgcctttgcggacggcagacggatggcgctgaaacgattgccctgcgtcttcgcaatgcggaacaggaagacgcctgcctgccgcagtaccggtactgcctggtttcctccgaccgcgagacggattatgcttccttttgcgccctgctcaaatgccagtccatgcgggtgggactgatgcggtgataaggtcttgcctgtttatcgagagactgcgttctcacgtttcgtcccccgtcgtatggcatccgggatggaggctccggttccgagacatttggaattggttctcttcccgtgcctatatggtatgtgattccctttcctctgatccggcctgcgtgaaaaaacgcgggttgaaattcttgacgtgcagggtactcataggctctttgaataattcaatgttgaaattatcttccaggcaaagaacctcaaaagaagtgccctggtaggtcagatactgtcccgtttccttgtattcgttaattgtctttttctggctaaatttttgactgtcagttgaatgtggatggatgaaactactgttttccgttgttctcttcttaaggagaaggataatgtaaaagaagagccctgcttttagacgaaacagggatattgttttttgttcccatgggaatgatggcgcctttgaccagtcgctttggtttcctttccgttgaccgggccttccaaagctattatcgctctacttgagcggatacaaccagccgatggcgcaggtaaaaatgacccagaggagcaggttgagggggagtcccactttgacaaagtccttaaatttgtaaccgcccgcattgtacacgtaagtgttggtctggtagccgataggggtggagaaactggcgctggcgccaaacatgacggccagaatgaagggaacgggattggcgtcgaattgcagggccatttcataagccagcggccccatgacggcggctacggcattgttggagatcatctccgtcagaatggagcagagcagatacagaccggagatggcgaccaggcaccccaacgggcctatgttatccactacgccgaacgcgatggctttggcaagcccggttttgctcatggcttcccccacgcacagcattcccaggatcaggaaaataatgccccagtccaccgactggtaggcttccttcggcttgatgcagccggagatgatgacgatgagagctccgatgaaagcgagatagaagggattgaagcgcgcgaagaatttgaagaattccccgtattgctcaaaggaccccagcaggccgataaaaatgaacagccccatggccaggatggcccagccctgtttgctgcggttgtgcgcttccgcggggcgctggctcagggggatgatgcgctgcttggtcaggatgcggttcattccttcctgcggtccttccagaagaagcgtgtcccctgccgccagcttggtattcggccccatgtccgtaatgtttttgccctgcctgtggatggcgagcacgaagatgttgaatcgctggcgcagcttgagttcggacagggacagcccggcgaattcggaattgttggcgatcatgccttccacgatttgcacatcgcgctgttccagcgtttccagcccgcggttgtcatcccagcccaggtccacgcctttggcttcccgcacctggttgacttttctggcgttgcacaggaaaagaatgcggtctccttcttccaggttgatgtgctgcaactcttcctgcatggagaaccccctgcggcgcacttccacgattttggtgcccagcagttcggtttgcatcaggttgatgggagtggtgccgatgtggggggaatccgcgggaattctgacttggagcaggaaatcgcgctggatgccgcccggaagcatggtggacaaagtggggcgggatggaagccatttgcggcctaatgtccagaggtagagcaggcctgccgccgcataaatcaggcccatgggtgttaccgtgaacatctggatgccgtcataacccagtttctgcacctggccgagcacaactacgttggtggatgttccgaccacggagcaggtgcctcccagaatggtggcgtaggagagggggatgagcagcttggaggccgcgatgttatggtccctgcagaaggccagcacgatgggcatcaggatgacgaccaccggggtgttgttgacgaagggggaaaccatgaacgctcccagagtgatgaccagcagggcggtcagttcccttcccttggctaccttgttgaacagtttggaaaggtctcctattaatcctgttctttccagggaagcgctcagaatgaacatgcacactactgtcagcggtccgctgttggcaaagctggacagcacatcacgcgtgctcagaattcccgtgagcatgaggacggcggtgcctgtcagggctgtgatttccacgggcatccattccttgatgaagctgatgaataacaggactagcaaaatgcctacaatccattgctgggcggccgctgattccagccagcctatgacggaggcggagttgatgttgagaagaggaagcatggcttgaaagttgaaggtgtggggaaagggtccaactctcctactttcccggcttctatctgtcaagccgcaataattttccggaaagggtttgaaaaggttcctgcgcttttttattgttggtgcgccgcatggattcccccataataacaaggttcgctcccagccctacaggcaatctccatttggggcacgccctggctgcgtgggaagcccgttccctggcgaaccgtttttccgggaagtgcgtgctgaggatagaagatatcgaccagacgcggtgccgtccggagtttgttcagggcatattgaaagatatggagtggctgggcatccgctttgacggtcccatgatggttcagtcttcacgcttcagcgcttatgaacacgctcttcagacgctgaaggaccggggcgtgttgtacccctgtttctgtacgcgccgggagattgcggaggaggtggccgccatgggtggggcgccgcaggggggctgcgtggacgtatatccgggaacttgccggctgcttgacaaggggcgcaggaaagagcttctcaaatccggcaaacctttttcctggcggctggattgccgtgctgcggcgcggattaccggtcccctgttatggagggacatgcggttcggagatcaggtttgccgtccagaagaactgggggatgtgattctgggccgcaaggactgcgccgccagctaccatattgccgtggttgtggacgacgctgcccagggagttacccatgtaagccgtggtgaggatttattccctgtgacgggcatccaccggacgctccaggccctgttggggcttcctgttccgcagtggtatcatcaccggctggtgaaggatgcttccggcaagcggcttgccaagagggacaggagcctgagccttcaggaaatgcgtgccgccgggatgcggccggaagacgtgttccgactgatgcgggagagctgaggaattttcattcccttataggcgggggggcgttgttccgccgggaaaggcaggggtcaggctgtggcttgcgtttttccagcagccggtcggatggttttctttccgatgcagagcaggcatgcataagccgccgccagggtcagcaggagaagggagctcaggatggccagcagattcagatgccccagcgggatgagccatgcgtgcggcatggctgccgttcctgccagtatctggggaagccagatgaaagccgcctgggaaaacaggctgacggctgtgaaggccagccccgcggccagggtgagccataccgccggaagtaccggcaggaatgtttcatggatgttttttttcatggcccgtgccattcctgcgaatatggaaacgagaaacaggggggccagcaatgcggcggcagggagggtgtcccaaaggagccatgtgcagaggggggaaacggccgtcaggaggcccgtgctcttaatcaggaggccccggggcggcggggctggtgccgcggcgtggttcatatccgttaatcgggccagacattgccgggcgtgcttccctgggtaatgacgacttcctggcctattttcagggtgaagtttggcgttacttcctgctgtacttccacaagttcgttcgtatccttgagcttgacgcgcacgcggatcattttgacggcttccaccctgccgtccacgatggagcctgtggcggaagccagttttgaggtccccatgccgatgatgccgggagtcatggcctccgccgccgttccggctatgttggcaaaggtgccgtcgtccgtggaggtaaggacgttgatttccttgatgcggaccacgttgcccagcttgatggtcgtcactttgccggtggcgatttccagattgcttttttgggtgcaggagaaaaggacagggagaataagaaaagcgggaatgaatggaagcggattcatgatgaacgtagttaactacgctggcggggttaagcgtttttcagcgtgtgggaagaattgtgtaggtagccagatacaggagcaaatggagggaggagagtgccagtaccctgttcatgcggctgtccgcgggcgttttgcggattaggagcatcagatacccgccgaagaggatggagggtatccacatccaccacgtatgggacaggttcaggtgaagggcccggctggatgtgggcagcgtgatgtaggcagccaggatgaaagactgggccatggcgcgcgcctttccttcccccagccgcacggccagcgtgtgcttgcccgtagtgaggtcttcctttctgtcgcggatattgttgacggatatcatgacggcgcacaggaggccgcattgaatgcctgttacgatgccggcattgtacaccgcaagcgattccaccagcgtgccgggcacgacgggtgccgtgcctatctgcaccagaatggttcccagtacggcaaccagtccgaagaagaggatgacgaatatttcccccaggcccttgtaggccagcggccacggccctcccgtatagccataggtgaaatagagggacgggatgccgatggcgaggatgggccagccgcgcagttcgataaggggaaaggccagaaggcacgctcccagcaggaagaagaggccgatgagcatgactgttctgtgggagagggctccgctggccgtcatgcgcacgggcccggtccgccgttccgtatcggcgtgcttggcatggtcaatggcgtcattgaaaaaattgcaggcaatctggaggcacaggcaggaagtcagtgtcaggagggccagggacgcattccagctgccggtcagtttctgcaccaccatgcagcctgcccataccggaatcagggaggcggtgagcgtcttggggcgtgccgccagaaaggcggaagtaataatattcatgtgagggaaggctccgtaatcagcggaggatggggccgaggcggcggagggtttccttaatgagtgagacgtgccattgcccgggggccgtttcctcttctcccaggtagccatataccaggcaggaacccagttgagagtaaagcaggcgggagacgggtcccatgggccccattcccatgacggcgatcggccccttgggcttggtgaaaagctgtactcctgtctggatgtccgaggccaggcagggagtgaatgcaaatttgacgatatccgccttgtaggagcgcgcctttttttcctgttcgcgcaggtaatccacacccggagtgatttggaaatcatgggtggagccgatgatgatgacgtcccgctcccgcgcttccataaccagttccctggcgtggcgcatggccttgatttcaatgtccatggcggcggcatatggcatataggcccggagcagggcaaagcgctcttcttccgggatgcggcgcagccctccttcctcatggcagcgcacggtgaccagcaggggcatctccggccggaactccataacctgttcagtcgtgagttccgggggaagggcatccacgcgcagttctactagatcgcactggtctgttaaatcttttcctttcagcgttttccatagctcccacgaggtaacggacgcaacgattttcggcggataggcctgatgttcacgtacaatctgctgcatacatcctactatcccagcaaaggaaggaaggtcaatcttctattgatgagttccacttcattttggggccgagtatgtcagtttgcctgccttttccccttttggaactgtgtttttcttcctgtgccagccctgttgaccggtttcccggcagacggattgacggatgttggcgccggctgccgttcaagatgccggcagggctgtttcgtatggtccgtttccttgttgtggcggagggcgttattttcctgcctctgcacgttaaaaacatgttgagaatggaggtccggcttgaaaagggagttcggatggagctaggtgaaggccatgaatatgctttggtcaaggttattgcggatggggcggaatcccttttgggcggctttggatgccgtgctggtggtaaggacggaaaaagattcgtccggacatccggaatggtcttggaaggcgtatgtcccgcatggcgttccggtttatgaattgcctccggtgcccgttcctcttccggaaggggattgggataaggagcggtttcgtaaggaaagacggaaagctgcccgggtgttgggtcaccaggccgctttaacgctggcttcttccttccatttctcccgtttcatgattgtggaggaagagtgccgtttcaggctgccggtaataggttccacggcgcggatgcttgggcagctgctgaaaggctgccgggaaagaactgctctgtttttaagtgagccgcgtttgtctccccatacggcctgctccgtggcgaaaggagaaaaatccatcctgctgcgcgtaacggatatggcggcatcagctgcgtatgtgatggacctttccttatgtgaacgcattcttttatctcttccgtcagatcagagggtctggccatggctgaggtattatggttctctggaggaatggtttgcccggtatctgggacgttatggtgatttgtatgctctttcccctgcgttcgtttcctgcggagagggcgctcccatgcccgccctttgcaaatccctgggccatttcaataatgcacgcaccaaatatacggatctgtcttatctggtgaatccggcggtcaattcatggcgctggctgaaaaacgtgaacattttttctggcagaaaaaggcttgggtgagaaccccgggatgcgttttgctccggcttcgccggattaccgtttgcgggggatgaacgtctgcatggctggggctgccgccttacggcagagcttgaaatagggtgttccgtgcgcccgtcatctcaaaagcaaaaccccggaccgcaggcggtccggggcggctccctttttccggagggaggatgccgtgatattagaggggttagctggctccttcgtcgcacaggatcttgacaaagccttcctcctggaggcgggtggcgccgcaggcgaacttggcccggatttgcagggcttcctccatatcgtcgcgcacggaaagcttcactttgaaatcattccatatgccaaactgggccttgctctttacccaggccaggcaggaacggactccctcttctgttttgggaagcctctgggtgcggataaatttgaatcccatgaaggtgtctattttcccttccaccagggcttttacattgttgaagtcataactgctgacctccgtttccctcagcagattcatgatctgggaactggttaccgcaatgacgagctggtctccgaactgcggggcatcctggttccaggcttcgttttcctcaaaaagctggagggctgcgcgcagcttggccacggtaaggttgctggtggatttggtgccgctgtccacgtgatccacggctatttgctggctttccttgaatggaacggcggtcatgccgtcttctcccacgtagttcgtatccaggaagccggagatcatcacgtcgtccatgcggcggcctgctgcggcctggagaccttcaatcgtcttgctgacgggaaggtccatgtctcccaggcgggtggcgtcaaattcatcgtagccaatggctttggtgaacgtgcgcggccgcatggaccggcgtgtggtgggagcctcgttcaaaacggtctgccccacccgcgtggttttttccgtgaagtccagaatgccgaattgatccagaaatactaccttgccgctcaagtcgcgcatgacgctgacatatttgtccagccgggaggcgtgctgctggagcagggtgccccattttctggtgtattttacctgataattatcgctgatagttactgccatgattgcaaatataatgatagtttgaatgcaggaacggcaatttggattatcgggtccggaataaccggagcggtcctgccgcaagcgggacgcggccatgtcccctgcgggattgcgggccggtcccatccagcgctaacgtgtatggactacaaggcagaaaagcgcaccacggcagaatcgtgatgtgctgtaaaaggaatgaaaggctccgctttcccgctgttaaagaataattgcgtgcggccgtgtagcgtgatccgggccgaaaagggccagcatgcggcccgtttgccctttttccatgcggtaggagtaaaaacgcttggtatccgccgccgtgtccagcccggaatcatgaatctgttcttccggtacccccgcttcaatgagctgtgccttaatggccgtaggaatgtcttcctcataatgaggcgggcggatacagggggaaatgacggcaatcaggttggacggttccaccccaaggcattttttcatggacttgatagtgttggaaacgatgttgccggcggttcccgccttgcctgaatgaatcagggaacggtggcagttttccttgtcgtacaaccacacggcggcgcagtccgccacgtaaatggcaagcacgcagtcggaaactccggagcaaatcaggccgtccacgccttccacaggataattggagccgatgtcccccaccagggcaactttcgtgccgtgcacctgttcggcgcggcgcaggtctttccaccgccagcccagggcttccacttccgccttatggtacggttccagccgttccagcacggtttcgcggtctccggtgacgtctactcccggaattctctcaatgaattggacgatttctccgggataggactggataggcttcaagaatgctggcgtttccataattgatggatcaataaatgtcgttggggacatcttgtcgttttgtattacctagtcgagcaaaatttggtgtaaaatgtcacggacgccgcccggtgactgagaaaaggtttttttccgcctttccggagtgatatgagcaattcatgctgcgcaggtattctttactttccactttttttgcgggaatggccgccgtgtttttttcctttgctgcctccttggcccaggagacttctccggatgccgggcagctgctgaaaagggtacgccagggggcaactcttcaggaaaacaaggacattaaggggcaaatacgcaaacgcagcgtcaaaattcccttttccatgagtctgcgcggcaatctgatagccttccagtaccagctcaataatgtctggaacaggttcgacctgaaattcaaggaccgcggccaggagatcctttcctggaaggacgggaaagccggtgttttgccggttgcccagtatgcggtgcccattgcggggacggacgtaacgtacgaagatctttccatgcgctacctgtactggccccaggcaaaaattgtccgggatgatgcggcgagcaccgtcaaggggcgggattgctggattgtccagataccgaatcctaattccggggtggggcaatatgcctgggtgcgcgtctggattgataaggagaacggcgccatgtggcaggtggatggcattgaccgccgcggggagctggctaaaaggttcatgattgattccgtgatgaaattgaaggacggatcctggtttttcaaacggatgaaggtggaggtccgggatccttccaatccgcgcagaacggtctccgtcagctacgtagatatggacagcccggaatagccttccggttcccgttccattccccgcggagctttcggattattctttccggggcatgggggcggattccttttcatgccgcacggatggatgatttaggacgtgacaagaaggcgggatgggcgtaaatcctccaaaaacctgttatgaagaaacatttattccttgcatgtgccctggcgttcggcctgtccgcctgttcccagcaccaggagcagccggcggagtccggttctccggtgaaaacgaccatttctcccgtgactgctcctggaaaaaagccggaccggccggccgtgaaattgcctcccaagtccgttccggtgccttccgtaagcccgtcctataataatactcctctttccccgcgcattccgggggtaacggtcaaccgtgtggctgtgccggacaaggtggtggccctcacctttgatgacggtccccatggaacgctgacccccagggtgctggacatcctgcgcgacaataacgtcaagggtactttcttcatgcagggctgcaatgtgaaggctcatccccaggtagtgcgccgcatggtcaatgaggggcatgaagtaggcaaccatacatggaatcacgtttatctgagcaaagtgccccgcgaaaaagcggaatcccagctccagagcactaatgaagccatccgcaacgcctgcggcgttgtccccgtggtcatgcgcccccccggcggctatacgaatgcaggcgtggcgtcctgggcccgccagcgcttcggcttcaccacggtcatgtgggatgtggacacgaatgactggcgcaagcccggctcctccgtggtggccgcccgcgccgtgaacggcgccaaacccggctccatcattctggtgcatgacattcacgcttctacggtggcggcggttgacgccattgtgaagggattgaaaaaccgcggctatgaactggtgaccgtttccgaacttatcaggagaggacgtgccgccgccggccatgctccttccatgcccgcggctcctgctgttccggattcttctcctcttgccgttccctcgattgtggctcccgcggagcctgttcccgctccggcggagacggtggccggcatgtaatccccggtgtttttccttttcctttcaacccggtttccctgcggaaaccgggttattcattgcctttccggagcatttttcccaccgccccggaaaggaggctttccccttaacgggcacacgcacagaaggcttgacctgctggtgaatttctccacaatcctttgccgtattattcacacccaatccggattgaaatgtctatgaatctcctggcatctgccgatactctacccgcacctggcggaatgtccgctcctctcgccttcatctacgatctcttcaataaccctcttttcatcttcattggcggtctggtgttgctgggtgtgtttttctggtacctgggttccgaccaggacaaggtcaagcgcaatgccggaacgattttcattatcggcattgcgtctttttccctgttctccctcttccagcaggggttgaaatacggcattgacattgccgggggcgtctccttcacgttgagcgtggaaccgaatatcggagacgacggcaagcccattcccctgacggaccaggccatggaacaggcatgcgtgatcctgacggaccgccttaacagtaccggggccaatgacgtcattatccgcccgaagaaaaaagacaacctgaatcttatagaagttcaaatccccgctgcggatcctgccaagcgcgaggaaaccaaggccatcctgaccaaagtagccaagcttcagattcttcctgtccacccgcgcaacaacgaactggtggcggagggtcgcattcgcgttcccggctacaggatgtatgaatataccttcaaaaacggcaagggtgaggacgtcacggaaaaaatattcctggaaaagcgtgaatcgctgacaggcagggatatcgtgcgcgccggagtggatctggcccgtcccggccacgtcaacgtcaccctgagcaacgaaggggcggacaagatgtataacctgacttcccgcatgcagctgggccacgaccgtatggccattgtgctggatgatgtggtcaagagcgccccaacggtccaggccattctgtcgaaaagttttgaaatcagcgggctggatgctcccggagaggctgaagccctgacgaaggtgctttccaacccccttaccaacaagctcaattttgagtccgccagtgaaatttccgcctctttggggcatacggccctccttcagggggaatacgctggcattacgggattgatcctctgcttcatcatgatgatcatctactaccgctttgccggtttggtggctatcatgggtctgacgatcaatgccctgcttcttctgggagccatgtctatcttcgggtttgagctgacgctgccgggtattgccggtattgtgctgactctgggcgtggcggtggactcgaacgtgttgatttatgaacgcctgcgggaagaaaaggaaatggggcgccccttccgcgtggctatccgcaactcctttgacaaggcgttctccgccatctttgactccaatatcacctcgctcattaccgccgtcatcctgtactggatggcaaccggcaccatcaaggggtttgccgtcacgttgacagtaggcgtcatcacttccatgattggggcgattctcgttacccgcgtcctgttctactgggcggataccgtcggcatgatgaaggatcttaaattcctcaacctctttaagaaaaagacgaacatcgacttcatgagccagaaaatctggtcctgctctctttccgccattctgctgatgatatgcattgtatttggcgccgtaaagggcaaggattgcctgggcatggactttacgggcggttcttccatttcctatctggtgaacaagggtgacatctccttccgggaagtggaaggcgtggtcaacaagctgtccctgacccagaaggctacggtgcaggaggtggcggagtccacggacagcagcaaagtgaatattctgattaatttttccgaccatgcccaggacaaggaggctatcaccacggcattggacaaggcgtttccggttctggacaacgctccgttcagtgaagaaaccatcgggcagtccatggggtacgatacgctcattacttccgcatgggcccttttcttcggcattctgggaatcatggtttacctgacggtgcggtttgaatggaccttcgccattggtgcggtcatcgccctgacgcatgacgtcctgctggtgcttggcctggtgattgtcagcggaacggagctgaatgttattcatattggcgcgttgttgacggtggcggggtactccatcaatgacaaaattatcgtatttgaccgcatccgcgaattcctccgcttctccgacccgaatgaaagcgcttcacaaatcatgaacgaagccattaaccagacgctttcccgtactattttgacctctctttccacgctggccgtgctggtgtgcctgtacttctttggaggtccttccatggaagacttcgcctggacgatttccgcaggcattttgattggtacgtactcctccatcttcatcgcttctccggcggctcttttcttctcccggaagcatgggttgcatgaagaagtcagacaggccatgaaggccggagcctgaggtttggcgttgagccgttaaatctctgaccggggaaggctgaatgccttccccggtctgtttcttggaaagagagggaaaggctctgtatggaataacctccgtgttctttccccgtcctatggaataacctccgtgttctttccccgtccgcctcgttcgcttttcctgtttccaccatatgcggctacggcttccgcatggctcttctgtctcgcattcctccctcttttatttcaggcataagaaaaccccgcctgccgttaggcagacggggccgtatctctggtttcctgctatgtatttctgcgggtgagattattcatcatccccttcctcctgtgccggggcgggagggggaggcatgtcgttgttgccgcgggctgcctttctggcttccctgcgcgcttcaagagccttggaagcgtcagcgttgagctgggccatttcagcctcattcaattttccgtccttgtcggcgtcatacttttcttcaatcaggatccatccggcagccatgatcggggcgcggttggggtcaagctggggacggggaccgttagggcggttgccgcgggggccccggttaccgtcttcacggcgtccttcaccgcctctgcggccttccggtcctctgggagcgcgggggccttcagctctggggcctcccggacgcctcggaccgtccatgttgggcattctcggtcctttggggccaccgggaacggcatggtgcgggccgggctggccgtgatgagggggaatggactgcaattcttccggggagagcttcccgtcgccgtctttgtcaaattttttgatcatggcggcggcgtgggcttcctggcgggctttcatttcttccatgcgcttggcagcttccggatggttttttgcccaatcttcccgcatggctttcttttcctcgtcggaaagcttgccatcgccatccttatcgtacttcttaagaatttcggctttcctggcttcctggcgggctttcatttcttccatgcgtttggcagcttccggatggtccttaagccattcttcctgcatagcctttctttcctccttggaaagcttgccgtccccatccttgtcaaatttcttcaggatggcggctttcctggcttcctgggccttcttgacgtcggcttgcagaacggctatttcctcgtcggaaagctttccgtccttgtcggtatcgtatttggccaataccagttcttctccgacaatcatgataccgggatcgattctcttcatctgaacccgttttggcccctggcggtctctgcctccggcatggtggcgatgacctccccttctttcaggggggggctgcatttcaggagcatcggaaggagcctccggagcgggaggcggcggagcgtcctgagcgaacgcggaacatgcggcgaaagccgcggcgataatcatttgcttggtcatatctttgaatggtgaggtttgatgcgtttcggaaaggagcgtgcgctgcggtgtttcaaacaggcggaaacgtctccctttgctaaaaggaacccctggaattcattccggttgcaaaataaaaaggcaaatgcgtcggagagggggtgcgccgctgtttttatgatacctgttttcttccggggtaaagaagggtgaacccattgaatatgaaggaaatcagtgagggaatacagcaatcgggcgcgagtgcgtgccgcccgtgtcatagcggaaaaaattattcgccggaaataaagcggatgtaggcctgccaccactggctgccgcccagcagccagatcagagcggcgctgagaagagcggggccaaaggggaggtttctgccgaaccccatgcgtgaggcggcagcctgtacaatccccagcagggagccgaggaaaaggctgaacagggcgccctgccagccgcacgcgcatccggccatcatcagaatccaggcgtcgcctgatcccatggcttccctgctggcatggatatccgtcagatttccctccacgctttccagtctttccagaagaaaaacgtccccgttttccatctctatcctgtcgtaccgcagcgtgacggagcaggcagggtgcgttttgccgtcaatggtgacggaacctccggaaaggacggccttgtccgtagaccggtggaaaagcatggaccagtcgtgaggctggccgttgacgatgagctgaagttcctcccgctcggattccggttccctcaaactccacggggcgggaacgtcaaaatgctgtttccaggtgccgaacagaagcttccccaattcaatcaccagcctgatgaccgcataccctgccgctcctcccagcacggatgccgtgaaggcgtccgtccaggtcatgacatggctgtccggcaggaggaaagggtaaagggcgcaggcccccgttccggccaaggcgccgataaatgcctgagagcggaagacaatcagatgttccgcgtcaatgaacatgatgacaatggccatggcagtccacaggcagagcaggacggctgctcctgtggaagcgtccgcgtatttccagccaatggccgcgaagagcagggccgtgagcagctccacaaagcaatatcggaagctgatgcgcgttccgcagcaggcggatttaccccggagagccagccagctcagaaccggaatattcaggaaccagggaatgggttttccgcattccgggcagaaagaacgcgccggatcgttgatggagacgccccgcggcatacggtagataaccacgttcaggaaggaacctatgcaggcccccatcaggccgaaaaccacgggaatcacccatgcgggaaaggcgtcaggcatgggtgggcggggaataggttcggctgggcgtctggttgatgcggtcaatcagaagcctcagcctgccgtagttgccgcgtttgatggggaagacgagccggggcaggcggtccaggtgtggttcgtccgcttcatccggcagggggccgctctggatcattttccccccaggcagaatcaggtctgaaaagtcccgttccagatgttccacccactgggcgggaagctgcgcattcagccggatgacgatggaatctccgacaaaacggtaggagtggaaaatccggtaaaaacggtcgatgtgttccatggcttccgccggatttttagtgacatggatgagatgaagatcgtctgcggaaatcagtccggaatccaccagttccacgcgaatgaaggccagccagttcagccagaaggttttgccgggggaatccagaaggacgatcgggtaaatggtcgcttttcccgtctggatcagagtgagcgtttcaaacacttcatccatggttccgaagcctccggggaatgccaccatggcgtcgctttccgccacgaagttcagttttctgacgaaaaagtaataaaaattgatgagtttgtcactgtgggccaccacatggttggaggtctgttcatacggcagggtgatgttcaggccgaaggagcgttgctctcccgccccttcattggctgcctgcatgatgcccggtccgcctccggtaatgaccatgtagccgtgttcgctggcttccctggcgaattccctcgccgtttcatacgccggttcgtcattcctgatgcgggcggagccgaagacggaaatcttgcggatgtggcggtacggggcgaaaacgcagttggcgcggtacatctcccgcccggagcggatcaggacggtaaaatcatggtccgaggcggcggactgggccatgttgattcccgttttgatatactcttggaggtagcggggatcgtgcctggtggaggctatttcggaaagctttttaacggcgccttccagagtctggtagctggaatccatggacatggtggaggggcgtttcttgtcttcacctgtaaaatccctgttgtccaaaaaatcaggatgcttcatgagttggtatgataggtttgccctactatgccagatgacgcacattaagtcacagaaaatttaccggcgggcatgaaaagagttgattgttgaaaacagatcgttacattgctccccgcacgggcgttcccacaacatgccgttggtccttcaggcgcattggccgccatgtccgtgttgaggggaaacccggtacattacatacgattatgtcggaaaacgaaaccactactgcagaagaaaccgccgttaccacgctggcccgttttgaggttcccagccgtctggaaaaaattgaagatccgaatgatgcgaatcatttgacctttgtggcggaaccgtttgaaaacggttacggccatacgcttggcaactccctgcgccgcgttcttctgggttctcttgaaggcgccgccattacctccgtccgcatcgccggtgcgcagcatgaattttcctccctgcccggtgtggtggaagatgtgacggaaatcgtgctgaacctgaaaaaggtcaaattcaagcataacggcaaggaaccgcgcctgctctctctgcgcgtgcataagcagggcgttgtgactgctgccgatattgccgacgacaccgtttaccaggtggtcaatcccgatcaaatcatttgcactctggaccaggacaccatgttcgaatgcgaattccaggttcgcgtgggccgcggttttgccaccggcgatgaaaacaaggtgccggatatgcccatcggcgtgattccgatcgactccattttctctccggttacccgcgtgaagtattctgtgcagaatacccgtgtggggcagatgactgactacgacaagctgatccttgaagtctggacggacggccgcatcgcccccgcagacgccatgctccaggcttccgccattctgcgccatcatctggacgtattcgtcaactatgacgacaagcaggtcaactttgaggaagctccttccgccgtccaggacgaggaaacggcccgcctgcgcaagttgctcaacatgagcgtcaacgaaatcgagctttccgtgcgtgccgccaactgcctcaacaatgccaatatcacgaccgttggccagcttgccatgaagagcgaaagcgaaatgctcaagtaccgcaatttcggcaaaaaatccctcaacgaaatcaaggacaaattgctggaactgggtctctccctgggcgttcaggtggatccctccctgcttaccggtcccgtgccgcaggccaagccacgcctgggtctggaagaggaaagccccgtgggcctggcagacctgattgccgccaacatcgaagacgacgacgactaaatctcacaaaaccaacacacatagaaaaatatcatcatgagacacggtgtaaaaacctccaagcttcagcgcaatgcttctcaccgcagggctctgctcgccaaccaggcatgcagcctcatcctcaatggacgcatcaccaccaccctggccaaggccaaggccctgcgcccctatgtggaaaagctgattacgcttgccaagcgcggtgacgtgcattcccgccgcctggctaccgctaccattcataatacgaccgccgttaagcggctgtttgatgaaatcgctcctctttgcgcggaacgcaagggcggctatacccgcatcgtcaagctgggccagcgtctgactgattccgcccttgtggccatgatcgaaattatcgatctgccccgtgaggctgccgaaaaggaagaagctcccgccaccacggaagccaccgcctaagacgcacctctggaacatcctgttaataccccgctccggtcttttgtgaggccggagcggattttttattggcaataaggaagttatggcgataatatcgctcttgcttctttcctgccggaacgttataatccagctttaactatggacgcagtattattgttttccggacaaggtgcccaaaaagtaggcatgggcaaagatttgtatgaccagtatcccgttgccaaagccctgattgaacaggcggacaaggcgcttggagaatccctttctgccgtcatgtttgaaggccccggcgaagaactgacgcgtacctgcaactgtcagcccgccctctacgtacatggccttgcctgcctggccgtcttgaaggagctcgttccctccctgaatcctgtggctgccgccggcctttccctgggggaattcacggctcatgccgctgccgggacctattcttttgaagaaggcctccgccttgtccagaagcgcggcgcgtttatggaggaagcatgcaacgccacgaaaggcactatggccgccatgatcggcggcacggatgaaaacgtcattaagctggcgcaggaatgtgacgtggatgttgccaatttcaattgccccggccagacagtcgtttccggtacggaggaaggtgtggccaaggctgtagcaggggcgaaggccgccggctgcaagattgccaagaagctcaatgtggcgggcgcctaccattcccgtctgatgcacagcgctatggtaaagctggcggaagaactcaagaatatttccttcggtacgccgtccatgcctgtttattgcaattatgaagcccgggtagtggaaggtccggacgacatccgcagcatgctggaacaccaggtatgcggatccgtgcgctggacggcttccatgcagaagctggtggaccagggccaccgccttttcattgaactggggccgggcaagacgctggccggcatgatggctcgcatctgcaaggaagctacggtcatctccattgaagacgtgcccagcctggaagccgccgttgcggagctgaacaaataatttccctgaataaaagggggtaagccgccggcccgttggggagccggcggttttttgttggcgtgttcatggcggggttccgtcaaataggcaatatcccatggaacaggggaaatgcctgtctccgtgccagcggccctgctcctgcgcgggcattttcctcatgccgccggtgggaagatgcatgaacatcagcatcgttcccatgaaaaaagcgatggcgggcacgaacagcggtttccatataaggaaaagtgcgggcatgatggaatgcgccgctcctcaggtcagaagaatcagggcaatgaggtaaaacaggaggccgcttttaggaggccggcaggagagcatgaaagccgaggctctgagccgcgccaggcgttcctggcggcgcagccccctgcatcaggcatgaaaggaattccgtcaggaaacaggcgttatggaatagaaattcctgatttctaaagaagttccgtcagagagcggatgatactggtcgccagggaaaaatccgcctgctccgttaccctgtttggaaccgagatgactggcattcctgcgcggtgtgcggctgtagtgccgttctgggagtcttccagcaccaggcattcagacggagatttacccaggttttccgcggctttcaggaacagggccggatccggtttgacggggaggccgtcgtcgcggcagacgacggtttgaaaatagggcatgatgcccaatctgttcagccagccgtccacccagcggtgggatgaactggaggccacgcccataggggttccggcttcccccaggttccggatgagttctccggcgccgggcaggaggccggcatgttccagatcccggacgatttcctcctggcggcggctgttgacggtttcccagtcgaaagtgcgccccgtcaatttctccagatattctccggggttccagtgggtgtagccgctgcccaggcactggttgaacaagtccaggggaagagggtggccgcaggacgcgaaaacccgttcccaggaggaataaatggcatattccgtatccaccagcaatccgtcaaaatcaaaaataacggcgtgtgcttgccggagcagtgcgcgggctttcagaacggcttcccgggaatcggcaaaatgatcaggaggggtcatggacgggagtctttttcaagcctctcaataattccgagaagcttctgtgggccagcttggtttgaaaaaggcggatggcgatgatggtgtaaatgatgttgggcatccatgctcccagccaggtggggaggtagcctgcggaggccagggtggggaaaaactcatacaggaacagcatggctgccgccaggaacagcgcaatgccgatgccggacatggcggagcgcctctggaacgtgatggcggaggggatggcaataaacgtcaggatgatgcaggaaaatatgcgggctatcctgacgtgccattccgtttgcaggcttctgaggtacctggcgtttgtcgttccggacttgatgagttcttggagggccggggttccctgtgtatccacgcggacgttgggtgaaatcagttgccagggtgtttcgggataatgctctttcagcgtttggtattcctgcccggcaaaaacgggaacatcgtggagctggcggggttcctcctgggaataatttcttttgatggcctgccggaaggtccatgttctggaggccggatcccaggtggcttcatcggcaaacagctcgtacttcatctttccgggggcgctgaactgttccacccgcacctgacgaaaaggatcgccgggggaatcaattccgggaggattgcccagataccagatgcgggattccgcatcatttttgtagatggtgctctgggaagcatggttgtttttgttctggctcagggaggagaacatcagtttcctgtacagggcggagttgggcgcccagtggaacccgaagatgccgaagttgatggaggcaaagacggcgccgatgatgatgggggtgttgattcggagcagggaccgtccggactggagcatgccggtgatttctgaagatgaggaaagtttggtaagtgcccagagtgttcccaggagaagggtataaggcagaatcaggttcaggatcatgggcagctggctcaggtaaaagcggaacgtgcccgtgaggggggcgtccaggttcatcaggtcgcccacattgtccgcaaaatctccgataatgtaaatcagcgtcaggatggccgtacacatgatgaaggccgtgaaccaggtgcgcgccacatacttgtccaggatgctcgaacggttgtacaggaacattcccagagcggggagaaagcagcccagaaggatgagccagggccgcaggagctgggaaaggggatattcggacggcgtaccgggaatttcccattgcatctgggaccattcccggggcatcaggaaccaggctgccgctcctcccagcgcaagcaggaggagaaatgcggaccattggcggaaatgtcgggcctggattgccatgaaaaaagagggtggggcaagaatgccagatcgggagcgggaaataaagcgttatttggccgccggacggggataaagggctgccggaaccgcatgtccgtgcttgcttcgtgaacttcagtgcggttccgctccttaaagggaggaaatggctgcgggagatgttcctcctgatagaagttgactgttgtcaacgtaaactggatgagataaaatcttcctgacaactgtttcccggcagcagcctttccatgtttaaacgtcttgttcaattgtttcttctgttttttctggttgctgcgggtgttctggcgtggtttgcgtggtacgtctccactcctctgctcattcccgtgggaggggaggaactctcctcttatcccgtcgcgggttccctggtgatggaacccgtggaagccgtttcatccgatggcacggctattgaaggttatctggtgcgcccggggcgtccggaggctctgtctccgcgccagagccgcgtgcgggatactctgaaattgcgtgggaaaatgccacatttggaagcaaaaccggagctggtcgtgatagccgcttcttggaatgagggagtggaaagttccctccctctggcggaagggctggctggagccggttacacgagcctgatatggaatccgcgcgggaagaacaatacccgtcaattctgcacgtacggattaagggaatatgcggatgtaacggcgcttttggacgccgtatcccggaagcagggtggattgcctcccgtggccgccgtggggcagggatttggtgcggccgtgctgttgaaagccgcgtctgaagatccccgcatccgctgcatggtcagcatggactgctttccttccctgaaaactgtggctgtccgggagatggagcaggattggggcaagcctctgtgctatgccgcttattggctgctggatgccggggtggattggcgtgcgggtttcagtacgtttgacgtggctcccgtggatgatgccctgaaattggattatccggtcatggtggtttgtacgaaccaatattttttctccacgctggaagattgcctgagcatttacgattccctgaaaaatgagaaaaaacagctttatgaatccatccgggaaggggaaccgtatggcacccgggaacggactttcctgcattccattgaaggaaagaagggggaaaaatttgaaaaggtctataaggtcaacgtctatgcgggggatgacgagctgcaggctggcattgcggaatggattcatgagaatacgcgcatgcccatgcccagggtgttgcctcatgagtcttacagtgcgcccgttacgggtaccgctccttccggttcatgaattgttcctttccttttgctgatgatcccgtgagtgcgaatcaggacaacaaccgagaactccgcgaaaaccgccgcaggcgcagccgttttattttgcccgcgcctcgccatctggcagctgtggcggcaggggctctccttgccgccgtgctggtgcattacctggggtttatcgttctgagctggtttgacctgggcattcatgtgcacaaagcccccgctgtccaggaggacagaaagcctctgcctgaaaaaatagttctgaaggcggacgaccgtcctgctccggatgtagcggaagccgttgaaaaaccggatattgagcaacttgaagagattcccccggaattgccggatttagaggatatgcttccggagcaggtagtgattgctccgggggaaaccagcttttccgcggatccggtaagtccttcccccccggaatccctttccccgaaaatgccgcaggtgaacatgaatgccgtcgcaaaggggttgcccgaaccctctccgcctgagatgctgaaatcttccgccagtccggttacaatcaagacggctgaaccggacatggtgaatccggatgaatggtataacaataagctcaaaggggcgggcggtcaggatgattcccatttgccggatgggagcaaatctctttcccagctcatggcccagtcctccttgggcaaggacagcgggtacagcaggctgggagcggatcttctttttgaatacaacaaggcggtgatgaaaaattccgccaggctgagcatgcttcagcttgcggggctgatgatgaaaaatccggatacgattttcattgtggaaggtcatacggacagctttggttccgaggaatataatgccgtgctttccctgatgcgtgctaatgccgtccggcagtggctgaaggataacggcatagctctgacgcgtccgaatggggaatgcaggttgtacatacgcgcttgcggcgcttcccgtcccgtcgtttccatcaggggggaccgggatgcccaggccgccaaccggagggtggaaatccacatgcgcaagccgggagaagaaatacccgccgggagcctgccccttacgtatgcggtggatatgaacacccctgtcgcccgccaggtgcgggccggcgtgggtgcccgcgccggaatccccgcctccccggcagaaaggaaagcgccccccgcagtgcgtccatcttctgccgccccggaacgccgggaaaatcctgtgccgcgtcaggaagtaattcctgaggcggaacccattccggaaacgattccttcggcagagcctgtggaggaacgcatcccttcggcagagccggtagaggatgacatcccgctggctgaacccgtcgtgtgtgcggggagccgcgccgtagtgaagggaggtgccggattgagatggaattgatgcgtttccttccggtccgggcgctgccgaaacccgaacggctccggtatcttttctcctttgattttgacgatactctgttcactcttggcggccctgcggaagaaaggagcattttttttagaaccatgcgcatgctccggtcgcagtatggtgttctctggggcgttaatacggggcgtgaccctgtctacctgagggaaggtctggcggatatgttccgtgatgatgcggaagcgtttgccccggatttcacggtgacgatggaacggaatgttcatctggcggatgcggagggcagactgatgcccggtgtcgcgtggaacgatgactgcgctgttgcccatgacagcttgttcacccgttacggcggcatgctggaatcattgatgagccagttggaatgccggttttccgggctgggactacgcaggcaggacaatgacgctttttccctggtggtggatgatgcctgcggcctggatgaagtttcctgcgtcattcaggatacggttggtccgtatgaggaaattgtcacgcaaagggcaggtccctacctgcgtttcagccaccgtgattacaataagggaacatccctttcctttgttgcctcccggttcggcattccgtcttcccatgtcgccattttcggcgacgggcataatgatctggacgccatgcggcacttgccggaggcattccggtgctgcccttccaatgcggcgcaggaagtgaaagacatggttgcccgcggccatggatacattagcccggaaccgcgcacccggggcgttctggacggcctggcgcatggagtgtttccctatttcgggatgaaggcggaggttttgaaggaggatatttgaaaacgggggagggccggatgctgacgggagatcggctttcaacatgtttctttcatcaaggcgctcccggaaggggaagaatcgtattgacaaggaatgccttcaatgcagaaatgggaaagattctttcccaatcccgattacatgaacattccctctttttcccgtagcgtttccagaggttccgccgtgggctggtttttagtgttgctgctggtttgcggtgccggagctggatattatctttaccaggataacctggcaaaaagaaaagcggcccaggaattgaccgctgaacgtaaattgaaggagaaaaaggccagggaagctgcggagaaacagcgaataaaacgggaacgggaaatcagggagaagaaggaaaaggaacggctggcggcccagaaggcttatgaggaagcgcaggaagagaaggcgcggcaggcggcggaagcggcccgtaagcttcaggagcaggccgaacgcgaagaacgggaaaaaaggagaagggaggagctggaacggcgcgaacgtgaggaagaggcccgcaggcaggaggaagatattcctgtggaggaagagcctgaaccggaagggcgttttccccaacccgtgaaaaaccggatgccggagctttccgtttattctattccttgcagggatgaaatccagacggaaaaagataagccgctggaaacatggtcctgggacaaggcggaaaaaatggaggggatggaggaattccccacgagttcctctccgtggaaaaaagggaaagacgccggacgcatgcaggcgcttctggaaaaatgccgggaatggaaggatgccaaacttgcctcgctgaaggcgtgcccggcggcgaaggattttcccggcgttccggagaatggggcccagacggtcaggcggacggtggagatagattccaatattggaggctggcatagtacgggactgtatgcgccgcccggggcggaaatttcgtgttccctgtccggcgctcccaaagacggttcgatcagtgtccgcataggatgccatacggacagccttcataagctggatgaatggaaaagagtgccggaaataaccatgcaggttccggctggccgtgggcgcgtgaaaatggtgaatccgatgggcggccttgtttatgtgaatgtaggccagcgtcccagacgggggaaggtcttcaaggttcagatttccggagccgtgccgtcacctctgttcgtaatggggaagaccactccggaacaatgggccgaacaattggaaaataccaaggccccgtggggggaaatccgcatgccccggcttattgtcacgatgcccgtggaacagctgaaacagtgtccggatgttcagaagacggcggaatttctgcaaaaaaacatggctcttcaggactggattatgggatgggataccaagccggaccgcctgcatcatccgatgcgctttgtcgtggacaggcagatatccgccggggccgggcattccggttatcccgccatggccacaaaggactggacgaattccatcgccaccggttccatcatccattccggaagctggggtttgtggcatgaactggggcataaccaccaatcccctccctttacgatggaaggccagacggaggtatccgtcaacatattctccatggtgtgtgaagtgatgggaactggaaaagactttgaatcctgctggggcggcggcatggggccgtacggcatgagcgcggaaatgaaaaaatatttttcaggcacccagacttacaatgaggctcccaacaaggtgcagctcttcttctgggtggagctgatgtactatctggggtttgacgccttccgccaggtggctcttcaattccatgacaagccttatgacaacggcgaactgagtgatgaaaagaaatgggaatgggtcatgaacgctttttccaaggtcacgggaaagaacatggggcctttctttaagatttggcgtacgccggtttccgaacgcgctgcgggcagaatgaaagaccttcccgcctggcttccttccaaggattatccggcctgttataccgcagaggaataagaaggttccggaacagggggggaggaggcgttgccgcactcgcttctggacggttccgccggctggggctaggatggcggagctgtgaaatggctgaatgactggctgggctttttcaagccccttcaggtgcggaacctgcaaatattctggtcagggcaggcttcggccctgattggaatgtggttgcaggtgacggccatgggtattcttgtgtacgatatttccggaggctccgccacggcagtgggggtgttggctgccttgaacgctcttcctttctttctgggcggcatgctgcttgccgggctgggggaccgttttgaccggaggaaactcctcatagccgtgcagtgcgtccagtggctggtggctgtagccctgtttctgctgactgtgctggatatgctccagctgtggcacttatacgccgccgggctggtgatgggcgtcaatcagacggtgggttttcccacacagcaggcttttgtgggagacctgataccgcgccggcaattacaggaggccgtgggtatgtattctctggtatttaatacgtgccgggctatagggccggcgcttgccggctacattattgcggaatggggcgccggaaccgcctttggcggcaatgtggcggcaagcctgccgctggttggctgcctggttgccttaaagggacgcgttgcggatacctccgctcccagaaaacagcgcggcgcaggaaggaaagcatccggcctcaaggcggtgcttgccacgcgcagcctgcttttcatcatgatcagcgctctgattcagaatatctgcgggcaatctctctatcagattgttccggcattgatgcacggaaatcccaggaataccggcctcattctgggtgcggtcggagccggagccatggtgagcatcctctttgtcctgccgtttgcacgcaaaagcgacagggtgggagccaagctttcctcaggcaccctgtggatggggtgcgcactgtgcgtggcaggcgccatcccggtggtggaagtgcaggccctctgtttcttttttgccggtttggccacttcttccctctttgttacttcttcatccgccgtgcagcttctgtcgcccccggaacgcaagtcggccattctggggctgttcagcattgtcaccatcggtgtgcagccgctggcggccatggggtggggagctgtggtggatgcctggggtgtccagatgacgattgtcgtggcgggggggctggaagccttgttttccatttggatgctgggcgttccattttggcgtcatttcaaattctctccggatgattgtccggagacgacatagcgccttcccttccatttgcggcaggggaagactgtcggtcctcatgctgcggggaaaaggggtgtgtggagggtttttcccccgcggaaattccgggatgcagccggccagggaagaggaagcaggttttggaaacgtcaggagcaggaaccggctgttagccgtccgtttctgcctcgtgttcggaatagctgatgcccagcatgcagatatcgtcggcctgattggtgcagccggtaaatttggctacgcaggtaagggcctgatggacgaaatccttggtgctgtggggggaggaattattaaaatagtcaatcagcctttccacgcccatttcttccccgtcctggttggctgcttccatcaggccgtccgtgtacatcaggatgcgggaccccgccaggagcgaaaactgggcattatggtacgtagcgtcatccagcagccccagggcgattcctttgggcagcggcattttgcgggcgactccgtccggtcccagaatgatgggatgcggatgcccggctgtagaagccgtcatgaccccggtttccagatccaggtaaatataaacggcagaggcaaacatggtggtgttcgcccgttgcaggattttggcgagctggtggttgagggaagtaaggaaagccgccgggttatccgccaggtgggacaactgttccatcaggccgcggagcatggaggcgatcagggcggcgcggatgccgtggcccatcacgtcgcagacaatggcgccgacgccggaactgcctacgggaaaagcatcgaaccagtctcctgcaaccccctccgaaggagtgaaaatatggtgaaaatccgcatggcgggtcaggccgtgttccgtatgggagcgggagggaatttcgtagggaagcagggcgaactggatttccctggccaaatctatttccttttccagagttctgttgcgttcctccaggatgcgggccgtttccgtggccttgatttctgtcttcaccagtttggtgacatcactggaaatacctacaattccctttagctctccgttgcgtccgtaccacgggaacttgctgatttggctccaggaatcatccttgtggagccatgtctcatgatgaaggcgggcgcggatggggcgtccggtaaccatgatgtccatttcctccttgcgggaaatatcggacatcgtttggtcaaaaaagtaatcgtccgtgcgtccggtcaggtctgccggcgtcggtacgcccagcttattggctgtggcggtattcgccaggacgaaacgtgattcccggttcttgaaatagatactgtcgggaatgtgttcaatcagggtatgaaacaggtccctgtcctccgcagcacgcagttccgccgttttccgccgggtaatattgacccatacacccaccagcataacgggccggcgctgcttgtccctgcgggcgaggccgttgacgcggacccagctccagcttttggagttcagcttcttcatccggatttcaatgcgcatgggcacatgggagtggccgtccagataacggcgcacttcctgggaaaaaaaagcctggtcttcctcgtgtatggtaagctccggttgggtgaagatattgggggctttctccttgcggctggcccccatcatggtcaggcagcggtccgtgtaatgaatgacgcccgttttaatattccagatataaaatccttcttccgccgccgccagggccattttgattttgtcccaggtaaaaactctctgggcggaatgtctgttgcgtgagggcggcattgcagttgcccttaatctaacgacaaaaccgctgtcttggcaagaggcaaaataaaggaatcctttctgaaaggaggtctggccgggggaacgcgtatgaaggacaccggctggtttttaagatggactcctatttttctttttccttttcctgggattgaagaaattgcagttctttcttcaaagcgcttcctacgcggtgcttggccagatagacctgggcaatcgtgacgccaagttgtcggcggaccttggccgcgtcccactcccgcaggacataatagtcaaaaatctggaactgcttgggcgacacttttgctttgacgcgttccagagccgcctgaagaaggttattctgccattcccgttcccatacctggtcaaaattattcttcccttcatccgggattttgtcgatggggtgttccagggtatccgtggcatcaggattcatcagcatggccgtgtcctttttccgcttgcggaactggtcattgatgcgccagcgggtcatgttccatagccaaagtttgaaggaaccctgttccggtttgtaaatatttttcctgctctgcttggcgatggaaagaatggtttcctgtaccacgtcccaagcctcgtcttcccttaatccggccttgagggcgacggaataaataagccgccaatatgtccggtaaaattcatcccaggtgcgctggtcttcccagttttccaaacgcgcgatcaggcttttcctggtatgttccgcgtattgggaaagtgtctgctcgtcaggctgggactcgttatggggttgcaatgggggcacattcatggtttatcatgaactacggatggaagtgaagcgaaagccgagtaataggccggaaaattctgcacggtccggcctgttcattcactacgtccgtcgtggagaaaatctttcagggaaacggacatgatcaggaaaacgtcaaaacgcaggggaacctccgtcattgcggccctgattgcgttgtgcgcggtggtggggtacggtttgacggagtgggcgccgctggataatgaaccgcaggcggttcccgcccgccagagggaagagcggcagacggttcgggagaaggtggaaatccccgacaagggggagcccgttcgtttgctgaccatgaacgccggcaactactttgtgccggaagacccgaggagaagcaattttcaggtaaaatacaagcctgtggaagcccgtgaagccgtggcggagctggttcgccaatcgggggcggaaatcgtggggctgtgtgaaatgggcggggaggctgccgttcgtgacttgcaaatgcggctgaagagaaaaggagttcatttgccgtacaaagttcttgtcatgcgggacggggaggaccgtggtttggcccttctttccaaatactgtatcgcggataaccgttccgtagcggacatgcctgtatccggagaggcgaaacggaaaaagacgatgctgcggggcattctggacgccacggtcagcatgccggacggacggctgttccgcctggtgggcattcatttgaaatcgcgcctcagccgtgacggttccgcagaggatacgcggcgaagggaagcctacgccctgcgggactacctgaatgaagctcttgcctctcaggacggcatgcctctgcttctgtacggagactttaatgacggcccgtcagacagcgccgtgcaggtcatccaggggccggctaaaacggaataccgcctgaaccgtttgaagcccagggattcccgcggggagacctggaccatttactatgaggacggagacacctaccattcctttgaccatcttttcctgaacaatacgctgaaaaagcgcctcggccgcaagcctcccatgggtatccttgactctcccccctcgctccaggccagcgaccaccgcggcgtgtgggtggaattgagataagcagggcctgatgttttttcagcaggggagatggaaacggaaaaaatgaaggctttggaaaaggaggacaaaaaattcttttcttgtcgttccggccttatccttcttgaaatgcgggagttggaccgaccggctgtttttcttttccggaaggatggcggaagcagggatttccgcatggcgattccttgccggaattttgttggacaggaacatatcaggcattcccgttcctcaaaaaatgattgccgtgtccgtctgaaacgggtagcatgccaaaaatcgttgttcaatcctgcatcatctgtatgagatatttttccaagcattccggaatggctccgcgctgttccttgtcagggagcaaagggtttaccctggtggaactgattgtcgttatcaccattatggtggccatgatggccttggccgccagcatgttaagaggcggaggcagagggcagggtcttcaggccgccgttgaaatggtggacggcatggtgcaggaggcgcggctggatgccatgggcaaaggaacgtggagccgcctgattattgtgagcactcctgatgacgaagcccgcaatatgcgcactttgggcgtgatgtccaaaaatacccgcaccgggaaatggcatttggtgaaccgtttgcagactctccctgccggtttttacgtcagtccgacctacagcacccttctggaaggcgcgaagaaagccaggggcgagaaatccacggcccgcgattttgccagccgtgacgggcaggataccgtcaaccttcccggcaacagaatgacggatatttacttcattgaatttgacgaggaaggccgtatgtcccagccgaacgcccccacccgcctggtggtggttgcaggttccgccgggaacggcaaggaggagaggccaaccccgatggtggacggcaaaccgggcctggcaggcggcattgtgatttatcccaaaggcaatatcagccgtctgaggacgacggagcaggtgattcccaattagtttctgtgatataataccggatttcccattttatgttgaccaagtgtatgaaacagtctcgtgccaaggggttcaccctgacggaagtggtgcttgcgatcggcgtggtggccgtgctgattgtagtgttcatggccatgtttattcctgccagaaggacggttcagtctgccctgactattcgtgaagcggaccgcatcgtccacgccctgacggcggaactgggagaactccgcaattccgagcgtgccgcgtccaacgccagaaagtcttcctcctccaaatatgtttctgcttttgacaaggcgttttactggatgcagttcacgtccaggcccgctacgaccattcttgtttacaattacagggcggatttgaccaagggggcccgcaaagacggaactccccagccctggctggaggatggcggaagcattcccggcaaaaatactgcggtggtgacaggggtctgcctggcgaacaacaaagagcgttgggatgatttcaaggcccttgtcggtcccgtcttcgccgtgcgcatgacccagctggtagtggagcgcatggattccagctcttacgggtacaagctggctcccaagtacggaacgatttataatccttacaaccgcggcaaggtgattaaggaaccttccctgtatgtttatacgccggagaaaggcggcggcctgaatttgccgtggggggcggaagtcctgtaccaggcggagttcttccagctgttgaatacggaccctgagcgtttacaacatctgacgtgggaaaatttaaagactcccgtgtttacgcgcaatctcgctttccgccgttagcgggcattatctgaagacctctgaaaaaacatgaagacatttgccaaaatcaaatccggcgcgttcaccctgattgagctcctggcagccatgaccatcactaccgtgctggttctggtcattgtggctctgacttcccgcggggtagatatctggagatgggtgctgcaggatgtgcggaccacgacgcttgcccgcacggccatggataccatgaccaaggattttgaaagcatgcagttccgtcccgggaatccctttgagtggatgctggtgcagcgggacagcgatttggtttcccgtgcggaaaagaccaaggtttccaggaaaaagggccgctcttcctccctgaatgaggcccgcgtgaacctgatgaccatggggccggaaggcgccaaaatcacaaatgcctcccaattggttttctttaccacggctacggaccgcaatccggccaagtccagcatggacatgcggaatgaccgcatcattggtgatgtgaattgcgtgggatacaagcttctttaccgtgaccagattctggaccaggacgctacggcggagtctgacggttttcccgtttattccctgtaccgcaacttaatcagcgcggaggataccgtgcgtaaccttctgggccagcaggatctatggtccgcttatgcacggtaccagcaggatgaaaccgtcccttccaacttcctggtggagaatattgtggaaatgacgctgatttttgaagtggattaccagaagaagatcggcaattccggcagcaacaaatcggacaaggatgcttcgcaaagagcatccgtgctggttccggtcatgactacgggcgccaaccgtctcggctcctgcacccagatggatgtgtatggcaatcgcctggacatcataggcagcagcgtgaatattgatgatttgaaatccggccgcgttactgccgtgacaatttccatgacggtggtgacggatgaaggcatggctcttgtggaccagatccggcagaaaaagcgtcccgctccctctcctgaggaatttttcgaacgttatacccggtctttcacccagaggattgcattgccgatgaaccgttaggcttgtatccgggaaaccggggagggcggaatcggccgctgttgctttttgtctggagcgttcctgccgttaattgttctgtagttgccatatgttgggtttcacaaatatcgtcggcaatttatcccctctgccggaattagtgctgtggcgcgatcctgttgccagaagcggggaggaagccatggccgtggacgaagctctgctggaatggggcaggaagcctgtgctgagggcgtaccgctgggcggaaccgaccgtgacttacggttattttgatgaggaggccacggcgcgcgccattttcccaggtgaggagcttcattttgtccgccgttggacagggggggggattgtagaccatcggcaggatattccctttactctggccatgcaccgcaagggagaaaaagagcgtccttccagcgcggttttgtaccgttggattcatggggcgctggcccgcgtcctgagggattgcggggtggagtgcgtgatgctggacggggatgccccggacggagggcgggcctgtttttccagccccgtaacgagtgatcttgtctttcccggcggggaaaaactggctggcggcggccagagaagagtccgcggaggcgttcttcaccaggggagcatccagaattgtcttctcccttccggatgggatgaattgctggctgcccgcctggcggaaaagcattccctgtgcgtggacgcggaattgttccccggcatgaatgcccgcgtggaggaactgctggcttccaaataccgtacggaagcatggcgttccggcgtacggcatgggcgtccgtctcaatcacggtaatttccctttttcccgatgaactatcttccagatcccggccgctacagctacgcagcctaccgccgttgcgggcgcagcgggctgctgcttcctcccgtttccctggggctctggcacaatttcggcgcagcggatgattttgagaacgcccgccggcttattcacggcgcgtttgatgccggtatcacgtattttgacctggcgaataattacggccctcctcccggttcggcggaagaatgctttggccgtattttcatgcaggatttgtcccgtttccgtgatgaacttgtcattgcgaccaaagctgggcatttgatgtggcccggcccgtacggggactggggatcccgcaaacacatgcttgccagcctggaccagtccctttcccgcatgaagctggagtatgtggatattttttacgcgcaccggcatgatccggaaactccccttgaagaaacggcgggagctctcattacggcggttcgctccggaaaggccctgtatgccggtatttccaagttcccggcggaacaggccaggcagatgtgctccatgctcggggaggccggcgttccgtgcctggtgcatcaggttcgttacaatatgtttagtcgggaaccggaaacatccgtttttcaggctgtccgggaaacgggtatcgggtgtgttgctttctctcccctggcccaggggatgttgacggaccgttatctggaaggcattcccgaagattcccgcgcggcgggttcctccgtctttttaacaaaggagcgggttcttcagcatggggataaaattcgccgcctggccgccctggcccggagccggggccagagccttgcccagatggctctggcctgggtgctgaaagatcccgtagtgaccacggccctgattggagccagccgcccctcgcaaatcagggattgcctgaaagcactggatagtgcgccgtttacgccggaggagctctctttgattgacgcagatgcggatagataggcactgtttttcccgtggtgctggtctttctgctggaaggggcattttcccgttccggacacaggttttttcttggagtaaagtagagctggtgttatgtttttaccactttaatttaaagtgtactgacaatgataaccatccaggatttattttggctcatcccatcggcttccgtgctggccctcatttttgcgggcatctttttttaccgcatgaaagcgcaggatgaggggaacgaagtcatgaaaatgatcgcccggcatgtccgcagcggcgccatggcctacctgcggcagcagtataagattgtcgccattttctttgtgctcattactgttgtcttcgcttttctggcctactgcctccacattcagaacccctggattcccttcgctttcatttcaggcggctttttctccggtctggccggctacatcggaatgaagacggctacgtatgcttccggccgcgtggcgaatgcctgccgccattccctggatgccgggctgcaaatagctttccgctcgggcgccgtgctaggcctgaccgtcgtgggccttgccatgcttgatatcggtgcctggtactgggttctggattggttttacggggacatggagctttccatgcgcctggtcgtcattactaccaccatgctgacgttcggcatgggggcttccctccaggcgctgtttgcccgtgtgggcggcggcattttcaccaaggcggcggatgtaggggccgacctggtggggaaggtggaggccggcattccggaggacgacccccgcaacccagccaccattgcggataacgtgggcgataacgtgggggacgtggccggcatgggggcggacctttacgaatcttactgcggttccattctggcttccgccgctttgggtgcggcagcttacatggccgttcctgaaatggcgatcaaggccgtccttacgcccatgctgatcgccgcccttggcaccattctttccctgttgggcgtgtacgcggtgcgcgtgaagcgcggcgcttcccaaacggagctgatggctgccctgaaccgtggcatcaacttgagttccttcctgattgccattgcttccgcattcctgctccagctcatcggcctggataactgggccggcatctggggggccatcgtcaccggcctggcggtgggcatcgtcatcggcaagagcacggagcattacacctcccatgattcctatccctgccgtaaaatcgcccacagcgcgaagacggggccggccaccgtcattatttccggcatcggcatcggcatgatttccacctgcattcccgtaattactgttgtcgtgggcactgtgctggcttacggcctggcttccggagactggcatttcaccggggcggaaatgagcaaggggctgtatggcatcggcattgccgccgtcggcatgctttccacgctgggcctgacattggcgacggacgcttacggccccatttccgacaacgccgggggtaatgcggagatgagcaagctggacccggaagtgcgccgccgcacggatgccctggatgccctgggcaacacgaccgccgccacgggcaagggatttgccatcggttccgccgctctgacggcattggcgcttctggcctcctatattgaagaattgaagatttccatccttcactggagtgaggccacgggcaataccatttacaaaattaatgatgccgtgagtgtggaggtttccaaaatctccactgcttccctgtctgatttcatgggctatttccaggtaaccctgatgaacccgaaggtgctcatggggctcttcgtgggggccatgatgtccttcatgttttgcgggctgaccatgaatgccgtcggccgcgccgcggaaaaaatggttaaggaagtgcgccgccagtttaaggaaatcaagggaatcctgaccggagaggcagaaccggattacgtgcgctgcgtggaaatttccacggcgggagcgcagcatgagatgatctggccgtccgtactggcggtcatcacccccatctgcatgggtatcgttttcggcgttcccggcgtgttcggcctgctggccggcggcctggcttccggctttgtgctggccgtattcatggctaattccggcggagcgtgggacaatgccaaaaaatatattgagcagggccatgtgggcggcaaaggctcggaaagccataaggcagccgttatcggcgatacggtgggcgaccccttcaaggatacgtccggcccgtccctgaacatcctgatcaagctcatgagcatggtggctatcgtcaccgccggcgtgaatatagccgtgaccctgttctaaacagaaagattctttcacggaaaacggagggagtcccgctgttctagcgggactccctttttttctggctgaagggaatcgtccactggtgagcggttttttaatttccgcttctttcaaaggctctctgaaagactgttcctaataggagggagggggtaagtatgatttttttaatcatatttttatttgtatcatattttattttggttagtataaaaaataacaaaatgactgacagaataggccagctagctttttcttccttccggtttttattctgctgtctggcagttttttccggcgttgttcccttgtgggcttcggatggcccggatgatgacatgaaggagacggaagaggaagcctgcgggcccctccagattaaatcccagacagaattgtgttctgcggattattatatcaagggaggaagtgaacaggacaaggaagacgatagaaaaagaaaaaatataggaattggggagaatatctcctttcttctgatcggcaaacctaagggaaatattgaagaaattacctggaatattaaaggagaaggcttccagcagacagatactaatccattcaaaggttcgcaacagatcactttgactgccaaaaaggatttaaccaaagatgcccgcgtcaccattacagccaaaaccggcgaagacaaagaagctaaaatcaccgtcaatatcaggattcccaagaagataacgaaggaaaaatatgagggacacatgggtctgggagatggcttttccgccaatacggctgattttaaaatacccaagggagaacacggtgtctggggatttattaaagtgacgctttttcctactgacgtcagttttaagggagtcaaggtgattgagcgggatgggggactcatgtgggaaggaaaggacgagactcccccgcagcctcaaccggaactggcagccgaacatgtaacctgcaacatggccgctcccattcaggataaaaataatttttatgatatggtaggggacaatcgcgatattgaggaagttcttgaaacgattcgccggtccaaacataatcctcaacaattttagtttgtatgcaacttccatattcattggggaaagggaggaaaaggcagtgaacaacaggattccatttttttaggaacgacaaatcaaaaataccgtattgaagccattgatcaaaataccacaaaaacggttgttgagaaattcggcatcacctttacaagaaccagcaatgaggattaaaaaacaatgaacctgttatctcctttatgcgcgtgtgccgtctgcctgatgatcgggaagggcaatcaggcctattccgattctcccctggagagcccggcgtgcatcgaccagtacaaacagccgtccgcaaccatccggggactctccggtttgctgaaggacatgcggctcaaatccttctacaacggggccaggaaacatacgctcacctttagtttgacgacacaggataacattgataccgagctgaaagagaaaatatggaattattatctggtagcttcagcgcccctttttacctacaaaacgtaccgggaaatcgagccggatgttgatatgggcgatgatagggctgatattcaccgcaagtccgaagcctgcctcctcatggaaaaatatatcggcctggttcgaaagacgaacaaaatcaaggaacccgtcaaaaagcagatcatccggcgcctgtttctttcctattacgcgcgcatcctgaaacagtacaaaaacgcgcaggaacccaatccctaccagagggatgcccagggaaatcccgtccctcccctttccgacaaggaaaaggaattccggaagcgtgagatagaaagaatcaaacgtctccccgttcaggaagtcctcaaactgatgcgtgaaggttcaagccaccgctcttttatcgagacaagaaatgaagtgtttggagatgaagtcaagcatcttgaaaaatccttcatgaaactgcttgtttccgaattccccggtcaatacggcaaggtagagaatttcattctggaagccggatattcgaaagaagacatccccagcctgattgaccgcaccgtgggcagggacgaaaagacggatttcctttataaagggaaacatcgtcagaaacatgacaggctctacaggaaaaagaagtgacggtgtctaaagccgaatgttcaagacgctctttcttccttttctttttgtgaagagatagccggaaaccgggggaagtgaagaagtcttgcaataaccggtttctggaaagggaattctggattcgtaaagaaggaaaagaaaaacgtgctgcgccatgttcgcagctctgttccgccggtgggagtgggggcgggcggttccttggaaagtttgaatgcgccggagaggtgtcgtgttttctctgggccgattgagaagccaatacggttttttcgccattgacggaaagtttttttgacaaagaaggggcagaggagtaataaacgcgcagatgcatttcagcactgtacagcccttttttagcgagaaccgttattacggcaacggctattggtggcgcgtacccatgtccggacgggggaatcccgaggtgcagtaatagcattcagctatgaccatttttcaagaactgctttgattcctccgagagtcaaagcagtttttttattttcaacttacatccatcatccatgcaaacaccatccatgatcactctccaacagcgcagccgccgcctgagcgccgatctggagacccctatcagcctgtttctgagcctgactcagaacaaaattcccggacttctgctggaaagcgcggaagtggacggcagatgggggcgctacagcatcatcgcctgcgattatctgatgaccgtttcctgtgtagacgccaggctgtccctttccatcaaagacgaccgtctggcttccctgaaggagctggaaggcatgccttacctggatggactgcgctctctgatgcagcgtctggagctggtgggggacgatatgaggcaggctcctatcacgcgggctctgtacggctatttcgggtatgaaaccgccgctctgttccagcccaggctggcgcagaccattcctgcctcttccgcagagtcctgcctggtgctggccggcaccgtgattgtttttgaccatttgtacaatcgccttacccagctcagcctgggcgaacaccgtgatttgtcccatgccccgctccatggggcagaggaaccttccataggggaggtttcccgcacgccggaccaggcggcttacatgaagggggtggagcatatcaaggagctgctgcatgacggagaagccatccaggtggtgctttcctcccaggcttccgcggagttccgcggagacgctttcatgctgtaccgccgcatgcgcagcattaatccgtccccatacatgtttttcatgcgcctgccggaggtgactttgttcggatcttcaccggaactgatggtgcgctgcacggacggaaaacttcagctttcccccattgccggaacgcgcaggcgcggcagggatgatgaggaagacgccgccctggccgccgatcttctgaaagatccgaaggaatgttcggaacatgtcatgctggtggatctgggccgcaacgacctgggccgtgtcgccaagcccggttccgtgaagctggaacgcctgatggagattgaacgtttttcccatgtgatgcatatgacttcccgcgtgaccgcccaggtgaacgacgggttgggcgtcttggacattctcggcgctgctttccctgccgggacggttagcggggcccccaaggtgcgcgccatggaaatcctggcggaggaagagcctttgccccgcggtccgtatgccggatgcatcgggtggctgggattggacaaaaacggcgttcacatggattccggcattaccatccgcagcatgtgggtgaaggatgggcgcatccactggcagacgggagccggcatcgtatacgattccgatccggcagccgaatggcaggagtgcatgaacaagggcaaaattattgacgttattttgaaaggagaagaccatgtttctgttcattgataattacgattctttttcgtggaatctggtgcaggcgttttacgccctgggacgcaagcccgtggtgcatgcgaatgacgatccgcgtatcttggaactggcggccagcccggagctggaagccgtgtgcatttctccaggccccagccatccgcgcaacgccgggctgtgcctggagttcctgaaacgcctccccgcttccgttcccgtgctgggcgtgtgcctggggcaccagctcctgggctacttcgccggggcggaggtctcccgcgccccgtatgtcatgcacggcaagagctccgacatcatccatgacggcgcggggctgtttgccggacttcccaatcccatgaccgtgggccgctaccattccctggtggttcagtccaaggaggacgagccgaacccccgttttaccgttacttcccgcggtccggaaggggaagtcatggctctgcgctacaatgaccggccgtgggtgggcattcagtttcatccggaatccatcctgacgccggacgggcttcagcttctgggcaacttcccggataacgtcgtgccctcggggcagaaggaaaagcgcatcagccgcattctggacgccctggccgccggacaggatctgacggcggatatggccgccgcaggctttgcggacatcatggatggccgcatgactccggcccaggcgggctgctttctaatggggctccgcatgaaaggggaaaccccgctggaaatggcccacgccgtgggcattgccctgggccgcgccaaccgggtggaaggattggagggtgactgcattgacgtggtaggcacgggcggggacggccgcaactctttcaattgctccacggccacggctctgacgctggccggaatgggatacagagtggtgaagcacggcaaccgcgccgtgtcctcctcctgcggttctgcggatgctctggaaggcctggggttcccgctggacgtagctccggaggatgtccggcgcctgttggacgagcggaacttcgctttcctgttcgcgcctaattttcatcctgccttccgtaatataggccccatccgccgggagctgggcatccgcaccctgttcaatctgctgggccccctcatcaacccggcgcgccccacgcacatcctgctgggtgtggcccgtccggaactcgttgagctgctggcggagacgctccgccagtcccacatccgcaaggctgccgtagtatatggtgccgggggatatgacgaggtgacgccgctggggcccaccaagatgatgatcgtccacaacggcaacttgacgcccatgtccctggatccctcggattacggcatccagccctgcaatccggaggaactggccgttcattccaagtcggaagccgtggatgtgctgaagaacatcctggcggggaaaggcccgcgtgccatgatggatatggtgattctgaatgtgggggtagccatgttcctgctggaggagcacatggacctgtccgtctgcatggcgaaagcgcgggaagccgtctgcgccggcataggaaggagaacgcttcatgctgcttgaccggttccgggaagccaaggcggaggaaatagccctgcttatggacatggcctcccgccgggaactgccgcgcccgtggaaggggcgccggccggatttcctgaaagccattgcggaaccgccggacggccagccggtggcggtcattgcggagttcaagcaatcctctccgtcgcgcggcgtcatcgcctccgggttgaaaccggaggaagtggctgaacagtacgctgcgtcgggagcctcctgcatctccgtgttgacggaagaacagtttttcggcggccgcatcggctatttggaacgcatgggccgcgccgggcttccgctcctccgcaaggatttcatttttcatcagcttcaggtgatggagacggcttctacgccggcttccgcgttgctgctcattgtgcgtctgacgccggacgcacggacgctccgcgttctcagggagcaggcggaggcttacggcatgcacgccgttgtggaagtgtttgacccggcggacctggacattgcccgggaatccggcgcgcgcatcatccaggtaaatgcccgcgacctggataccttgaagacggacaggcaggcctgcctggacatggcgaaattccgccgtgagggggaggtgtggatagcggccagcgccatgagcgccggggcgcatctcagggaagccgcggaagcggggtttcaggccgtactgatgggaacagccctgatggacggaggaaagccgggtgaaaaactggcagcaattttagaagaaacaatatgaagaagcattcatttgcaatcaaggtgtgcggaattacccgccagagcgatttatcaaccgccatggggatgggagcccatttctgcggcttcatctttcatcccggaagtccgcgttacattgcgccgccgcgcgccgcggctctggattccgccctgatccgccgcgtgggagttttcgtgaatcagaatgcggaggaaatcatggatatcatgaaaacggcccggctggaattcgcccagctccatggcgcccattctctggactgcgcgcgccgcatcggcccggaaaaggtaatccgcgtattgtggccggaccggtatgaatccgtggatgccctgcaaagggaaatggaactatgggcggacagctgcgcctggtttctgctggatgccggcacccagggcggcggccacggcgtttcccttgactggatctccctggcatctctgagttccccccggccctggtttctggcgggcggcctttcttccgcctccctgaacagggcgctggaacaatgctctccggacggcattgacctgaactccggcgtggaagccatccccggccagaaaagcccgcagaagctgttggcggctctcaaacctctcaccccttacactccttaccacatcgcatgaaaaaagaaggatatttcggcaatttcggcggccgcttcgtaccggaagcgctgcgtccccccctcatggagctggaggaagccatgaactccatcatgccgtcccgcgagtaccgggacgcgctccaggatctgctggtccattacgctgggcgtgaaactcccctcacgttctgtccccgcctttcggaagaactgggcttccgcctgtggctgaaacgggaggacctgctgcataccggagcccataaaatcaacaacgcccttggccaggctcttctggccaaaatgatggggaaaacgcatctgattgcggaaaccggggcggggcagcacggcgtggctacggctacggcggccgcccggcttaacatggactgcaccatttttatgggcgcagaggatgtagaacgccagtccatgaacgtcatgcgcatgaaactgctgggagcgacggttttcccgattgagagcggttcccgcacgttgaaggatgccatcaatgaggctttgcgctactggatttcccatcaggcggataccctgtattgtttcggtacggcggctggcccccatccgttccccacattggtcaggcagcttcaatccgtcattgggcgggaggcccgcgcccagatgctggagcgcgcaggcaggctgccggatgtggtggtggcatgcgtgggcggcggctccaacgccatcggcatgcttcacccctttgtggaggatgaaggcgtccgcctggtgggtgtcgaggcgggaggcaccggtgagcccggctgctataactccgcccccatcaatctgggcagtcccggcgtgctgcacggccatgtgacgatgcttttacaggataaagacgggcaaatacagccgtcccattccatttccgccgggctggactatcccggggtaggcccggaacacgcctatctggcggaaacggggcgcgttcattacggtatgatttgcgacgcctccgctttaaacgctttccagacgctcaccagggaggaaggcatcattcctgcgctggaatcctcccatgccgtggcctgggtgctggaccatgcggaggaattgccgcagggaggggacgttctggtcaatctctccggccgcggagacaaggacctgggaatcgtcaggaaatatatcaatctttaagccgcatcatttccatgaacaacatgcagaaaacaccgttacaggaagccgtggaaagggcccatgcccttggcagacgcgccgttattccttttatcaccgccggatttccggacaaggattctttctggacccacctgtcccgcattgacgaatccggcgcggatattattgaaataggagttcccttctcggaccccgtggcggacggcccggttattgaacaggcatcccgggatgccctggcccgcggcgtcagcctgaaatggattctggacggcctgaaagcccgtaagggctgtttttctgccaagctggtgctgatgggatatgtaaatcccttttaccagtatggcctggaacagcttgcccgggatgcggaggaggctggcgtcagcggtttcatcgtaccggatatgccgctggaggaatccggaatgttccgggaagttttcagcccccgtggcctgacgctcgtcactctggtggctcccaatacttccgtggaacgcatgcgggaatacaagccttatacttccggcttcgtttatgtggtctccgttctgggaaccaccggagggaaagccaatctggagcagagcgttacggaaaccatgcgccgtgcgcggtccgtttttgatgtgccgctggcgctgggcttcggtcttcagacgccggaccagctggagacgctgccggaagatgcccgtccggatgccgccgtgcttgggagcgctctgctcaggcatattggagaagggaaggacgcctgggaatttttgggaaaatggaccagaggttgaaccgcgcgtttctccctggcttttaaggataggcctgcgcaacttattgtgcaggcctattttattttatctggtaatagattatgaaaatacggattcgcaatccgcttcgcttttattcacatattattcaattttctaaataaaaattgtattgataattaatatgttattatcttcagcataatctgtcggagggaaatctggattttctttgacggaaggaacgtcccggatattccggaaaaccgttgtaactgcttcttttcctttgacagcggattgcgaattccttatttatattcacaatcatattccccttgccgtgttgtgggaaagggtcttatttgtttcattaaatacctaattatcaaacgttacatgaaattacacctccctttgaatttgttggctgccctgatgacctccttttccggagtaacgcttggcactgccacgctggcaggagtttctggtcttttgatgacagtatcacagtcttatgcggcggatgtagcctttgacggaacgcaggtgaatgtggcggcgggaggtacggcctcctatgacattggtactgtcacggcttctaccaccttgaattttgccggagccggcacggccaccatcaccaatttgaacggaacggccccggaagccatactgacggtaaaccgcgtggccagcgggggcgccagcctttccacgctgacgttgaacggagcaggcactttcaatggaatcatttccctttattccaacacgacgggaggatcacagaataacatcctgaatctcaaccacgcgcaggctgcccaatacgccacgatcaagctgggcggccacggttacacgacgggagcttccgtcctgaaagccggcgtgaacacttccatcagcaagctggagcacaacaataccgcggctctgatcaccggggaggggactacgctgaccatcacggggaattcttcctcctacggcggcagtttcggcgggaccgtgacagtggactatacggggggagggaccttcaccctgggcaattccaacaagggtacggcgcttacgcccgcgtcctctcctgatgccactcttaaaatcagcagcggcactctttccctgttttccggcaatgtcacctggtcccagaaactggtgatgggtgacggcaccacgctgaacgtacaggacggtccttccgtggcggggtatgccggctataacgccacttccgtcaacagcggcggttttaacttttccggagcgacgacgttcggcagcggcgtcaatctgacttccagctggggcaagaacgtgaagttttccggtgttcttaccgcggcaagcggtttctccatcagcggcggcgcgaatgaatatacctattacaacctgctcaatgcctccaatgaaattggagggacgattgccgttacgcgtaacttcacctccctgggaattagttcttccggctcccttggcaatgctgccgtaaccacttccactggttcccagtatgtgacgtattatggtactgcgggagaaacggcggatgttattggcaactccatcaccggagccggcaactttgttgcccagtcgggctgggtgcatctttccgagaacgtagcgcttacgggaacctataccgtcaattccggcgccgttctctccaaggtcggctctatcaacgccgctcttgccgggggcagactggatgcgggggccggaaccatgaccgtggcggggctgtcgggaaacggcgtcctttccgcttctgcgggcaccatgcatttccaggacgccttcacggtaggggaaacgatgggcatccttgccaacggttccggggagatcacgggcaatgtgacggtggatggaggccgcctgtattatacttccatggacaatgtaggcagcgtgctgcagaacgtgacgctgacttccggcctcattgatttctccggttttcaggaattccaggacctgttcggttctgaagccctggtgaacacctcctataacctgggcgttgatctgggggctggcttcactttggcggatattgacgaatccctgtacacgatcagtactgtggacggaaaaacagtcatcacctttacggcttccggagccagcgagaccgtctgggacccggcctgggggctggaagaggctccctcttccgctaccggcatactggcgaaccagcagaatctgtccctttacggtatccggccttcttccatgcaggagggattcggctccgtgaatgccgtcaccggaacgggagacctgacgggagtgacgctggccggcggctactacaatacagccaccaatgccacggctacgcaaattaccaccggcatctggacggatgtgctgggtggcaattataatctgattatcggcggcagctatgccaataactggagcggttccgggaagtgggacattacgggggacgtccatacccagattcagggggacacctccgtcaactggatagtgggcggcaattacaaggacggccaggcggcaggcattacgggagacatttacgtatccgtggacgggaatgccgtgatcaaaggcagtttgataggcggcggcacagccgcccataattccgtaaacaaccttgacggcagcacgcacatcgtcgtgcgcagcatgcagagcgtcacggacgaaaccatttcgctcaactccgtcgtccggggcttcatcatcggcggcagcgcttatgaagccaattccgcgtcccgcgccgccattaccggaagcaccaatgtgacgattgatttgggagaggcatccggcaattttgtcaagagcatcgtgggcggttcctattcgggaggttccggggcatatacgataggaggcgattccaacgtcagcatcaccgctgccagtgacgccgtctttaccgggtctgtctatggcggcgggtacagttcttcaggaacatccaccgtcagcggcaattccagcctgacgctggatgggggcgcttacgcgggcgctctttatgcgggcggcgggggaacaggatcctccgtaaacggggacgctacccttaccgtcaagaaagcagtattccgtacgggcagcacactgaatgcatcggagggtacggtaggcggcacctcttccttgcttctgggcggttacggcaatacggcggaccatgccatttccttctccaatacggctgtgaccggttttgacatcgtgaccatgttccaggattccttctttacggggaacctgaacatggccggttccagcgtgctggcgctggcgggcggcgccggaacgggaatcagcgtggacggtacgttcgctctttccgctgaaggagaactgaatctggatctttccgaattcggcaccctgacagacggcatgtccgtcctttcaactacaggcttgtccaatatatcctccattaaggcttcctttgctgacggtgtggcgggaaccatcaccgtttccgaaaacggcaaagaccttgtttatacggcgggaaccctcctcttgtgggcgggcggtgaaagcggaacctggagcgcggaaaacgtctggacggatggcgacgcccccgcctcgtatgaggacggtctggcggtttcctttgcagaccaggccggagtctctaactctgttgtacagctggattccgaggtttcgccaagctccatgcttgtccgcaactccaccacccgttatgaattgacggggacgggagaaatagccgatacggccattaccaaggaaggaacgggaacgttggttctcggaacctcttccatattcggcgagggtactactgtagccgtgtcgcagggcgttctggcatttggttatgatacggccctgcctggcacgggggtaacctgggaggccggttctttcctgggagcggccaatggagcgacggtgacggtggatttgggagccgtcgccaacccggtattctccctttctccggatgccggttcatcgatcgctctggcaactccgtccgacatcgttttcggcaatgccatcatcggggaaggaactgtccggaaaaccggcacgggcttgttgaaactgacggggagcaactccggccacatcgtggtgcaggaggggtctgtccaggtggggaacggaaccgcgtccatccgctggggaggcgccggttcttccgtcaccctggagaacggcacgtccctgattattgccggcaacagttcgggaaattcccaccacaccattggttccgatttgattttaggaacaaacgcgtctgatgccgtttctctgaaatgggtggacgcttcccaggcaaacgcaaccaattatcagcatgactttacgggaaccgttaccgtcaacggggcagtctctctggtgggcagggacaactgggccaaggaaatggggttcaccgggacgctcaccggagccggttccctgacgtacagccgcggagcgggcgacggcaggtacaatgccaacggcaaactcatcatcagcggagacgcttccggatttaccggaatgatcaccatgaatgcctcaaacggctacagcgccgggctggatctgcgcacttccgtttctcaggggggtgtcactctgacatccggaacggacactaccggatttgccttcatgcgcgtgctgggggatgttgagattgcctctctggacggaacggcgaattcccaagtgggagccgtaggcggcgcgcgtacgttgacggtgggatccggcacgtacaacggcacgctcacagaccgcggtattgttcttgcgtacggggccacttccattgcgtatgacgaatccggcgttttgtccctgaccaaagtcggcgatgagacgctgacgctgggaggaccggtcagctacacggggctgacggatattcaggggggaacgctcgcccttactgcctcaggggctacttccctgcggaacatcacgatggcggccaatacgcggatgacgactgcgggcgctttaaacctggctgccaacgccgcgctgacgctggatatcagctcctcgctcggagtgggtggggctttcggctccggaacgttcaaccttacgctgaacgggcttgaaggcattacggaagccggggaatataccctgatttccgccgccagcggtcttgattccgccagcgccgtctttaactgggccgggtatgtcggagacgaaacgctgatttacgaactgcagcagaccaatactgcccttaagctggtagtgacttccgccggggacgtgtggatctggcagggaacggaaggcgtgaactggagcgatacgaacacgggcaccatgtggggcattgaaggttccgcggaaacggctgccgggaaggatctgatcttcaacacggccggagcgggaaccgtcaccctgtccggggcggtgaatccggcctccatcacggtcaacaacgccgccggcagcgactatgtcttcgtttccgacggctccggaaaaatcgcccagggaacgctgaccaagcgtggcgaagggaagttgacccttaatttggacaacacgggctggaacggggatatttccgttcagcagggcgaactggtggctcaggtcgccaactccctggggtccggcgccattaccgttacggacggcatgctcacgctggctaccgcggaagttcagccgggaatgggcatgatcaacctgcagggcggcagcctcaatctggcttccggttcttttgccacggcgtttaccgcagacaacatggcctggacgggcggttccatgatactgggcggggaggtgaccgccaccgtcgccaaggctctggccaatggaaaaactatggaactggcggacggttccgtactgacggtcagcggggctaatgacaactcggcgctgaacctgaatgcttccggcactggtaccgtttccgtgggcctgggaaccagctatggggccaatgttctgaacatgagtacggaattccaggggatcctgtccgtgacgtccggctatttccagttgaacaacgtaacgatgggtgcggacggcacgctgaaactggcggattccaacgtccgtacggaatggaacggaacagccggaggaacgtttgccaatgacgttgtctttacgggcaaccaggtctttgccaccaaggatttcaccttcagcggcgatttgagcggaacggcgttctccacccagggcgcgggcaatattaccctggcgggcggcgtcaacctggacggtcagcttaaggtgcaccgcggcacggttaccgtgaattccgccaatgtggccaaactgggggacagcattgacatccagaacaactccacgctggcctttgcccgcgatttctcctacggaggcgtcatcagcggcacagccggcagcacggtatccgtaaacgccggaacgctggaactcaccggagcgaacaccttcctgggcgcactctccattgtgggcggcgctacggcgcgtctgggtgacgggagcgcctgggccgggtccctctccggagacggttccctggtcatcgatactgccggagagataacgctggcggccggcaacaccgggttcaccggttccaccaccctcgcgggaacgggcaccgttactttgggaggggctgactccctgggggccggacgggtcaccgtcaataacggcgttctcaatctgtcctctctggatgcggccaacgtcattctgattacgaagggcagcctggaaaacgcggaagccaaaaccgccgggaatgtggaagtggccgcttccgccggaacgcagggagacctgaatacgatcaacctgggcggtttgtccggttccttggtcggctccatcgtcatggaggattactcccggcttacaggcgtttccggggctctggacatgacgggcaagacggtgacgctgaaactggattccggcagccttaccgcgggcggaacaaccggacagggcgtcattgatgcggacagcctgacgctttccgccgccgacacaaccatcaacctcagcaaccagggcgttctggacctgcttgccgccaaccgggattccactgacggcgtagggcttgtactgacaacgggaaccctcgctgtggacaacttcaagcaaatcggattctctcctctcctggcttccctcggctataccgtgacggaagtcctgggtgcggacgggacgctgatggtcagcggcaatacggaccttgtctatctggtggacaccacccccaattcagacgaccccaatatcagcgattacgccgcgctggatccctacaaggctgtcggcattaatggcaccacgcttcatgtgagcctgaacggggctccggaagcctcccggaacggggacggcctgaaagtcagcaacctggttggcagcgatggtgcgctggtcgtgacgaatacggcggatgatgcggcctccaaccacgccgtggtggatctggttcagaacgttgacgccggcggcaacagctacggcggaaccatcagcggggaccatgtggattttgtcaagaaaggtgcggaaaccctcaccgtggaaggcaacttcaccgggaatgattccatgctcagttccgcggaaggaaacatcgtcctgaacggtgcaggcaatagccttactgcgctggaactcgcgggcggagacataacgctgggcggacggaatgacggcgcctcccgtgtaaccacggtggagacgctggctgccggcgcgggagggggaaccctgaatttgggtaacggaacccagatggttcttaccggccagcaggccggcagccatgtcacggaggtgattatctccggggacggtacgctgaccttgggaggtacgggaacggactcctccctgacactgggcaacggctcttccctgaacggtgtcctgctggatatccgtgaagggtccgccctgtccgccgcaaccggttccgtgaataccgtttccggactggcgggcggcggagctctgaagctgagcggtgcggaaatgacgatcaattcttccgcttcctatgcctttaccggtacgctggacggggcatccggaacgctcaacgtcaaatccggcaacggaagcgtccagactatcaagggtgcaggcaatgcaggttatcacctgaatgtgagtgacggcggcgtgctgaccctggccggagcggcaggggagggcggcaatcccgcccaggcttcctatcaggggattaccgtgaatggcggcacgctcaatatcggcagcgcggacgatcccaaaacccagctgacgcttggctcggacggcttgagcgtgacgggggacagcacggtggccattaccacttcctccacaacggtggacggcctgggcaatccctttgtcacctccagcggaaatattacgctgggagacgggacgggggaagtcacgctggtcatgaacaatctggataccctggtttccgggagttcggaaacgctgaatatggaattgttcaagacaacggacggcgcgcttgtgtccctgggtgacaatgtcaccctccaggatatgattcttggttccatgtatgaaaacctggagctgaccaccaataacagcatgacggccatcatcctcaccggtacggcgcgcacggaaaacattttccgtgactcttccctgacgcggaatgccgccactggagcggacatcctttggaattcccgctatcacatggaagaaggcactgccttgcgcgatttctatacctctgttcttctttcccagaattcaggcgactattccggcgccgcccgcaaactggccgccgccgccggcagcacggttaccagcctgggcatcgcccagcgcgactccctgcgcgaccagatgggctggatacgcaaccgcgtggcgcagatgggcgttaaccctgcatatgtccatgaagacatgccctacttccatatgtggatgcagggaaccgggtcttatgccaagctggacaccaggggggatgaaagcggctacgaactcaccacctggggaggcacggtaggcatggacgtggatatcaacgaccgcttcactgcgggagctgcgtttacggccaattacggaagcctgacggccagcgcggcggatacggcggacggagacctggacagttactatgtcaatctgttcgcccgctaccagtaccgtaaatggtcccatctgctgattctgacgggcggctggaatgatgcctcgctgacgcgcacggtggattacggtacggggtcttaccaggcccgcggcaatacgacgggagccggtttcggcgccatgtacgagttggcgtatgacatcgctctcaatgaagacaggagcgtgattctccagcctttgttcaacgcttccatcgtgacgacccgtatggacggctatcgggaaagcggttctgcaggaaatgccggactgaaggtggaagaccaggaactgactacggctgctgtcgctgtgggcgcccggctctccggactcatggggtccaacgtcttcgggcgtgaagcgctgggagaagtacgggtgaacgtttcccaggatatgggagaccgccgcgggcaggccaatgtgggcttcctggcggatccctcctatacgcgtccggtgtatggcgccaaggtcggaagcacggccttccagattggcgcggggctgagcgttcccgtgggcactcagggcgtcatttttgtggacggcaacgcggatatccgcagcggttccagctccatcaacgggagtatcggctaccgctacaacttctaaaggaaaaaacgtcagccaattggaaagccgctgcggaatcatccgcagcggcttttttcatgaatggacgggatttctttaaggataacttcaagcttgggttgacttccctgatggctgtttacttccattcccattcaatgggcgtttccagatcgggccgcagcgcctggcgcacagggcaggacaaggcggttttttccagcatggcgcggagagggtggctgccttccaggggcatgattgccttcagttcaattttttcaattcccttggatgattccgccgcacgcgccagaacgcgcatgcctttcaaatccactccttttctggccgcgaccacggaaaccaggctcatcatgcaggaggcgagcgtggaaccgagcaaaactccgggggaggggaattctgcgcggccttcaaaagaagcgggcaggtccgtggcaaacgtaacgttggaagggataaaggtggtttcgcagcggaattgtccgacgttttccgtttcggaggtgtaataatgatcagtcatgaagatgtgacagcgaaaaccctgttcgggttcatccggctcaggttattgtcacgttgaagagccgtgaagttccgctttgcaaggaacctggccgttccttcatgacatggttgatttttccctctcgcttccggttcccggcatcatttctttttaagcgctgctccgccgtgtcttcttgcggcggaaaaaagcttacgccgtccccttcggcttccttgcggccagaatgcgccggatgggttccgcataaagctccggctccagcaggaaggaatcgtgtcccttggtggaagcgatggtatggaactccgtgggaatatgggcggcttcaagctgcgccgcgaaatcctgctgttccgccgggcggaaacagcagtctgtatcaatggaaaagataagcgcgggaatccctgcgcggcggaagccttccagggcggtttgaaatgttccgtccggggtgtggtcgcggatgtcgaactccgcccacatatccgcaatgcggatataggagttggcgtcaaaacgttccgcgaacttggtcccctggtgaagcatgtagctttgcgtgctgcgggtgggggtcatccacgtgagcaggccgtagttgcctcccacctcttttctggcgcgctgttccagcccctcctggtaaacaaatgatttgtggccgatgatacgggcgaatgccagcccttttttgggcgccggcccccggtaataatccccgccctggaaatccgggtcaagctcaatggccaggatttgttcaaacagggacaggcggtgttcaatggaagcccggtaaccggagccgatggagatgaagctccggacgcgttccgggaattggcacgcgaaactgagggcgatcaggccgcccacagaggggcccataagatgaacgcgttctatgcccaggctgtccagcagaagggcctggaggcgtgcctggtctgcgatctccacgtgagggaagcgggagccgtagggctggccgtccgcagggcagggggtagcggggcctgtggtgccgtagcaccctcccaggtaattggcgcagatgatacagaagcggtccgtgtccagcggcttgccggggccgatgatgctgttccaccagccttcgtggttttccggtttccagagggagccggtgcccgggacttccggattgtagccataggcgtgctggctgccggaaagggcatggaacagcaggatggcgttgtctttttccggcgtcagggttccgtactgttcataggcgacgcataccttgtcaagcgtagctccattcctcagggagaaggagttgggaagattcaggaatttggtttggacggcaggaagctgcatggatgtacggaaaagggcttggtcagcaaaaaaagaccggcacccggcgggcggcggtcttcttgaaatctgtgctgggccagggattacttgacgccctttttggaaaggcgcgtgcctgccgtagcgccctggcgggccttgaacttgggattgctcttgcagatcacatacagcgtgcccttgcgcttcacgatttggcagtctgcgtggcggcgcttcatagaggctaaggaagaaagaactttcatggtgtataactccggtttggtgttcggttcgggagacggaatataccgtttagttaagaattgtaaagtcatttctttgccaaaagtaagatgccgtctccgcagagatgcttttatgaggaagatgcagtaaagcatgggatggctttggattccgcgccggcggaaaaatttagggaagacgtcatttatccgagaaaataaaatgcgggaagggacctcagccgggggaataaagggtttgtggaccggaggggattcgtataacatcttttccggttttccttatgactgattcttcctcacctgattcctccccggcttcccggaatacgtttgcccatcatttgggaatgaaagggtttctgctcatggaagggctgttgaagctcgtgggcatgaaaacgctgtaccggctggggcgcgcggcaggggccgtggcgtggtatctgcttccccagcgccggaacattgtggaaaggaatctgcgcatcgttttgaatccggccctgcgcggaaaggaactgcagaaattaagccgggaaaatttcaaaaggaccattgccaatttcctgtgttccgcgaagacggccaccctgacggatgagcagttgaagcattgcgtgacggtcggagggcacgaacagtttgccgcgcctgtgctggaagggcgcgggcaggtttgcgccatagcccactccggcaactgggaggcgctggcgagaatacgcgcattttacccggaggtggagcgttacgggtccatgtaccgccagtttgacaatccgctgatggaggaatacgtgtaccagcggcgcacggaacgtggaactcagatgttctccaaggagggcggcatcaaggctcccatgaaaatgctcaaggaagggggggccctgggcgtgctgagcgaccagttcgtatgggagggggtgtatgtcccctttttcggcaaggtgaccggcacgactccgctgcccgctctgctgcgaaaaagggctggcgcggacatggtggccatagcggtgcgtacggatgctcccggccactggatagcggatatggggaatgtggtggatttttccgggtcggacggctctctggcgggggatactattgaagtgaacagggggctggaaacattgatccgggaatccgtgctggatgtgttctggatgcaccaccgctggaaatccgttgaccgttttgctccgcaggataaaaaaacggctgcgcttctggaaaatatggagctgaagccgtaccgcattcttgtagccgttcccggggcgttggatgaagccctggcgaccgttcccctgattcgtgccctgaaaaccgtccggtgcgacatgcaggtgaacgttatctgcccgtctgcccagatgggaatatggaagacggtgccggaggttacccatgtgctgccgcacgattccctgaagcagcttcgggaagctttggtggcagatgaattttacaatgacggcccgctggatatgggcgtcatgctggatggagatatggaaaccctgaaagcgctggaaccgtatggccccatgatgttctccgggctggacacgcatcccggcgtccggaaatacaaattccgggtaaaggcccccgtcctgcgcgccgcccccccggcgcaccgggtgcagctttatctgcaattgggggggctgcatgggctggacgtcggtaaaccgtctttgttccctgtgaaaaaagcggccccggcggaaggcgcccccattttaattgctccgttttcccgtctgggaagcgccagtgaatggagccgggagcagtggacggaactggtttcccttttgccgggacggacggttctggtggctctggaagaagaccgggagcgcgccgccgcgctggcggaacatttgaatgtggaactggctgtgggtgcgccggaggctctgttttccgtcatggacggcgcttcggtggcggtagccgtggatggcgatttcccgtccctctgttccttccgcgggcttccggtggtgactctgttttccacccggcttccggatgtgtaccgccctatgggtacattcaaccgttccctttacagccaccagtgctgttccccctgcttccggaaggattgtgaccgggatgtcccctgcaaccgccacattgccgtgcgggaagtgctggatgctttgcgggaaatttccggaaaggaataatttgggaaaggggagaagggcctttcatccggaagatgaggaggggagatatctgtattcggtttgctgcggttgatggcgccaaggcgcgaaaatccggttaatgcacgcaatccggaaagccttcccgccggaaaatgccgcggacctgttccgccagttttgcggacgcttccggggtgcccttcaaggtataatccagcttcaattcatcccatttgaatctccccatctggtggaaagggagcacgtccacgcgttccacgttgcccaggagcgccgcatggcgggagagtccctcaatttcttccagattatccgtaacgccgggtaccagcacatacctcagccacacgggcttgcggagggaggccaggcgttccgcaaactccagcgtagggcgcagttccccgcctgtcagggagcggtaccgttccggattccatgccttgatatccagcaggaccaggtccgtatccgccagcatttcttcgcccgcattcacgcccagatggccggaggtgtccaggcaggtatgcagtcccagttcccggcagcctttcagcacggcgccggtaaaatcaggttggaagagggggtccccgccggagagggtgacgccgccgcccgccgcctgcaaaaaatcccggtaacgggctatttccctgaggacatcacccgcgcttctgagccggccccgccgaacgtaggaggtatccggattgtggcagtagcggcagcgcaggctgcagccggacaggaaaaggacaaagcggatgccgggaccgtccacggtgccgcaggattccacggaatgaaccaaaccggtgacggagctttctccgtccggatcatggttttgtggaaaaacctgcggcatccgtgtgtcgtccgggttagcgggtgtggaaggtgcggttgatgacctcctgctgctgttcccgggtcagcttgatgaaattcacggcatagccggaaacgcggatggtaagctgcgggtatttttccgggtgatccatggcgtcgagaagcgtttcccgttccagtacgttcacattaatgtggtgacctgtagcggcaaagtaggcgtccagcagggagacgagcttgacgcggcgttccctttcctccttgcccagggcctgcggaacgatggagaaggtgtaggagatgccgtccagggagtcgtcataggacagcttggctacggagagcatggacgccacggctccgttcctgtcccttccgtgcatggggttggcgccgggggcgaacggttccccggctcggcggccgtccggcgtgttgcccgtctttttgccgtacaccacgttggaggtgatcgtcaggatggactgggtgggcagggaattgcggtaagtgtggagcttgcgcagtttttccatgaaattgctgaccaggctgcatgctatgtcgtccacgcgcgggtcattgttcccgtaacaggggaattccccttccgtcttgaagtccacaatcagcccctcttcattgcggatggcttttacggtggcgtacttgatggcggacagggagtccgccgccacggaaagcccggcgattcccgtggccatcgtgcgcaggatttccggatcatgcagcgccatttcaatgcgttcatagcagtatttgtcgtgcatgtagtggatgatgttcagcgcgtcaatgtaagttttggcgagccagtcctgcatcttgtcgtacagggccatcacttcatcatagttgagaatttcttccgtgtagcggggggagggcggggccacctgtttgcccttgagttcatccacgccgccgttcagggcgtagagaaggcacttggcgaggttggcgcgcgctccgaagaactgcatctgcttgccgatgcgcatggcggacacgcagcatgcgatgccgtagtcgtcgccccagtgcgggcgcatcaggtcgtcgttctcgtattggacggaggacgtttcaatggaaaccttggcgcagaagcttttgaaggcttccggcaggttccgggaccacagaacggtcaggttcggttccggagccggccccaggttgtacagggtctgcagcatgcggaaggaactgcgggtgacgagggtgcgcccgtcctctcccatgccgccgatggattccgtcacccaggtggggtctccggagaacaggttattgtaatcaggcgtgcggatgaaacggacgatgcgcagcttcatcacgaactggtcgatgatttcctgaacttcctcttccgtgatgagcccctgttccaggtcgcgggtgaaataaatgtcgaagaaagtggaaacgcggcccagggacatggccgctccgttctgttccttcacggcggccaggtagcccaggtacgtccattgcacggcttcgcgggcgtttgcggcggggcgagtgaggtcgcagccgtaggaggcgcccagctgggcgagttcttccagggcgcgtatttgttcgctcatttcttcgcgcaggcggatcagctcatccgtaaggggggaatgttcacggtttttgaggtccttgcggcgttcggcaatcagtctgtccgtgccgtacagggccacccggcggtagtccccgatgatgcggccgcggccataggcgtccggaaggccggtaataatgccggcggaacgggccgcccggatatcggaagtgtaggcgtcgaaaacgccttcattgtgcgtcttgcgtatctttttgaaaatatccgcggttttctcgcacatcttgaacccgtaggattccagggcctgctgggccatgcgcaggccgccaaagggcatcagggcccgtttcaggggggcgtccgtctggaggcctacgaccacttccagttccttgtcaatgtagccgggcttgtgggaggtgatggaggataccacttcttcatcagcatccagaacgccgccgttgtctatttcccttttcagcaggactttcagttcatcccataaacggagcgtgcgctgggaggggccggaaagaaattcttcattgccggaatagggcgtgtagttatgctggatgaaatcccgtacgtcaatggactccgtccatgctcccggcttgaatccctgccattccttcggaagggcggtggactccttcaagtcttttactatgctgatcataaataggatgtagtgaagaagaccggagaaaaacgttccgcagccgttgaaaggccggaaacggcaaaactccgcgccacgtaattatatcgtgaattccgggagacaacaaggctaattctttgcgaagagaacgcgggtgcgctggctttggcatgtttcacctgtctgtccgttgcggagcggaaaatgaggggaacatgcgattgcggaaaagtgacggaagattatttctctttactttcctaatctctattgcagtatctcaacgcttaccgttatgaaatcttatgcatgcctttgtttattgctggcgggagttttttgcgttgcttgtttctccggtgcctgtgctgatgaattgccgcccacgctgaagccccaggagaaccagcgggccgtgcatgactggaaaaacgccatgaggcagtgatggaacggacccggaccgtcaaacgggggtatgtcgtttttggtgaaagcattaccctccgttggggagtcgagctttcctggggcaacagggctctcggaacaggaaaggccggatgcggtgttcgcctggccgctgttgcggcgggatttgccggacgggcagtggtcttttttactctgccggcaaaagtggcgcctgcgatcttgatgcacggcaggatttgcttaaactggaaaccggtttcacttttttatcatgaatttcttctcctacatgctcgccatattgctggggggggccagtgtggcgttttccgcaccttccatccctccctccgcgttgcccgcaaccctgaagccggagccccatcagcgggatccgtatgattggaatgcccggcatgaagccgttaaaaaaagaaaccggaccgtcaagcctgaatatgtgatgataggggacagcattacccaccactggggaggggagccttccggggacggaaaaaacacgggagcgggttcctgggagaaattattccgtccgcatactgcgacgaatatgggctttggatttgattatgtggataatgcctattaccgtgtgcaaaacggggagctggacggcatttctccgcgggtcatcatcgtgctgctgggaaccaataatctggggcaccgcaaggatacgccgcaggcatgtgcggacaatatcagggcgtttgtccgcctggtgcgccggaaatgcccctcttccaaaattctgttgctgggcgttcttccaaggaaggagaaaaacctggcggaaccggtgaagcagacgaacaggctgctggcggagctgcataacggaaagaacattttctttgccgatccgggaaaggctcttctttccgcagacggtgcttctcctcagaatgaatttatgaaggatgtggtgcatcccaatgccaggggatatgaggttttggaaaaggaactggccgtacttttgaaaaagcttgatgcaaaataccggggagggaagcaggcgggaaagcattcctgatgatcgtcttctgatggaaggcaggattttgcttgaagggaaagccccggctgaggaaaatatacggcatttgatatttagtttatgaaaaacctgttgtttgcattgttgaccggttccttttgttgctgttatgcccaacagaaggcagcacccgttccggagcctgaagttgtcgccactccgccggctgatgcggggcgcggcctcatccgtgtggactcccgtgaaatacgccattattccggtacccgcaagggaccggattacctggtcagcagggataacggaaaaacatgggaaatgaaggccgctccggctggctaccctcccaactacggcggcattcccaaggaatctccggctattgtgcgcaaccccctgaccagggaattcattcgtgtgcagcctatcggaggctttgtatttctttccaaggggggctggacggcaagtggtttgccgtcacgaatgacggcaagctggaagaagactggaaagatccggaaaagaggaaaaatctgaaaaaactgggcggcatcatgcgcacccctgtttttgtgaacaagggccgcagggtgattgttccgttccacaacatgggcagcggtaccaagtttcatatttccgatgacgggggactgacctggcatgtatccaggaacggtgttacttcccccaaacatgaagccaggcccccccaccagggtgtcagatggttcaacaatgccgtggaagccacggttttggagatgaaggacggttcgttgtgggcgcttgtccgtacttccctggaccaggcgtggcaggctttctccagggattacggtgaaacatggagcaaaccggaaccttcccgctttttcggcaccctgaccatgaatacgttgggccgcctggatgacggaaccatcgtttccctgtggacgaatacgatggctctgcctgaaaacgccacagccggcaacggaacgtgggaagacgtgttcacgaaccgtgattcccaccacattgccatgtccggggacgagggtaaaacctggtacggattccgggagattatcctggacgaacaccgcaaccatcccggctatgctacgctggatggtccggaagaccgcggcaaacaccagagcgaaatggtgcagctggacaaaaaccgcatccttatttccctggggcagcataaaaaccaccgccgcctggttattgtggaccgccgctgggtaggggccaagacgcgtgctacgcagacggggaaagattcggattcccagtggaccattcatacttatattccccagaaaaagggccattgcagttataaccgcaagccttccgcagagctggttccggatccgtccggaagtacgaaaaaggtgctgcaaatcaagcgtctgaatgatcccgaactggtcaatgaaaaatccaatgtggattaccggaacgctggagctgcctggaactttccgaacgggaccacagggctggtcaaattccgattccgtgcagcggacggggatcaggcggatgattccggccttcaggtctctctgacggatcggcttttcaatgcctgtgattccactacgaaggattatgccctgtttaccttcccgatcaggctgagacctgcgccccatctgctgctggggatgaaaaaagtgcctttcacgcccggcgcgtggcatgaaatttcccttctgtggcagggggggcaggctgtggtgtctttggacggaaagaaggccggaacgttgaaaatggctaataagtcccccaatggagccagttatattcatttcatcagcaccggttcccaaccggatgccggcattctgctggatacggtgaatgcccgtgtgaaataaacggcggtattcaacggttttccttcttcggaagcggcggagcgctcaattccggcaggtatttcagcaccatttggagatgttcgtttgaccggttgcctatccgctggagggctgtgcgtccgtatttgtctctcagggaggggtctgcgcggtggtccagcagaagacgcgcaatacccagtttcagccggtccagggaatcgtctcccagcaacattcctcggcagcacgccatgaggggagtctctccggcggcgttttgatggttgacgtccgctccctcgctgatgaagagactgaccagctccctgatttgagggagctgggacacatcaatgaaagccagctggcggcacaggttcagcagggccgtgtcccccgtggtttccggcagggttgtggacgcgggcatggccgcattcacgtccgcaccgtattccagcagaatatgtgcgatttgcagtgcggtgttcggagtgttcaggttcagggaaagaaggggcgggaccatttccccgcggaaattgggatcgtacccggcttcgcaaagcttgcggaccagcagggggtatccggcggccgtggcccatgtgagcagacttgtttttttacctttcaattcaggctggagggaaatatccgcaccgcatttcagaagaaacagggctgcttcctcatagggtgctcctccaataccggccacacaggtgatgacgaggggcggccagcccagcggccccggtttattcacatccgcaccgtattgaatcaggagattaaggcaggagatcctgttatgcaccggcaggggcgtggagtcgtccatgcctggctggcaggcgtaagtcaggggggtatttccctgttcggagtccggaatggagggaaaggcctgttgcggcaggatgatctggacgttcgggtccgcatggcgctgtaaaaggcggttcagcaactgcacttctccgagcccggcggcaagatgcagcagggtttcatgggatggagtgatgcagcgtccgtctgcgctttccgccgtgtcccgtatcatctgaagccgttccctgatttcgtccttcatatattggcgcatggaaacttcggaaaacatgtgccagtcaatatggcgtgaattgagggaaagcccgcggtaaatgaaacgttccgggcttcgatgggctgtgaaattcgctacggtaagaatttgttctttttccgcttttgtccagatagggttgaaattccattccgcgggagaagaatcattcctgttcagccagaaaacggcgaaagtcgcggcaagagaggcaaaaaagctcaaagctccaagaaaccagagagttttctttcttaaagtcatgtgtatcataagcaggggtactgcgaaaggccatgatgcaggaatccataactccgggcaatgaaaaaatagtatgagcaaagaatgcccggggcaaaccatgtgggaattcgggtggcggattgcaaattcggaggagaattttttcctcttcatctgggaaaaaagctcgtagataaagagaattacgaaggaaacggaaaatatggtgtcatgggccggacttcacaaaaattatggagtttatggcgtggattatttaactccaattatttgaattgtatccgaatttgcaattcggtgtgatacgctaaatattgcggatgtgcggatggtttcaaattatttgcatttgccgctgctgcactcacggtagaatgaaggaagctgaaacttatggaagaaatggagattctcccgtaaaatgatggagagaactgtatccttgctgctggcctcctggtcttccctttcgctgtccgctccatgctgtctgaagccgctcttgccctggaagtaaggataaacgatgattctggcagcgttatggattccgtcaaacttattgcgtccgatatggatgggacgctgcttaatggaaaaggtgaattggaccctgcgttttttcccttgtttagggaacttgagcttcgcggcattcgttttgcggcagcaagcggccgccagtatgacggattgctccggacctttgcccccgtggcggaccggatgctgtttattgccgagaatggcgcttatgcggcggcgggtagaaaagaatggctgcttctggacatggatcatgaaacggtagccggtttgattgccgggatcaggtgcattgaaggaacctgcatcgtcctcgcagggcgggattccgcatatattgaggacaaacagccggaattcgtccgggaggcccgcaaatattacacacgctgtcaagaagtgggggacctgctggacgtgcggggagacaaacttttgaaaatagcagtatatgacttcctgggagccggggaaaacagttatccccggctgaagcatttggaacatggcttccaggtggctgtctccggagagaaatggatggatatcagccggaaaggggccaataagggggccgctctggaattgattcagaggaaactgggaatttcttcggaggaaacgatggttttcggagatcagatgaatgacgcttcaatgatacggcaggcgcgtttcagttatgccatggcgaatgccgtgccggaaatccgttccatggccgcatttgaggcgccgtccaatgaggaaaacggagtgatgcaggtgcttggaaagatgttggacgcccattctccgcagggaagggccgggaattgcaggaaaccccgtctctaattgccgggtaatggaataaaatcagggttatgttgatgttattgtcagatttttttaatatgctggcgatggccgtgttcgcttgcattggcggtgtttttctgggaatgggctttctgctgcttaaattggcgggaatttttttcggaatattggcggggtgtattattctgatggaagcggccggaaggtggatttcccatttgatgggggcgtgagtccgttattcccggcaatgaaggggattcctgtacgctttccgtgaggggagagctttctgatggctgggccattgccggctgctgttgttgccggttcattgccgaatgctgaagtggaaggctgcatcctgcctggattctgcgtgttaaaaccggatagcggagttttgtgataaacagacgtttgccgtaagatgccctggaagacagagccccgcagaaaggaagtcccaaggatatgaaatgccgggcgtccccatggaagggactgttgcctttgtactatttgacagggcgggagacggaattttaccgtccctcccgtcagcatgaaagctgttgtcctttttagttttgcttttccgcaatgtctgtggtacacccgtgccagacgtcatgaatcaggaatttttttcagtgctcgtgcaggtggcggccgccctggggctggccggcatgatcttgttgctcagtatcttgatgggcaagcgttcttccgtgcgtaaaccggcggacattccctacgaatgcgggataattcccatgggggaaggtgcccccatgttctctgtaaaattctatatggtggccatgctctttgtcatttttgacttggaagtggtattcctctacccctgggccgtcaatttccgggactatattatgatgaatccggaatcgttcacggccatgtgcattttcattggcattttgctggtggcctacctgtatgcgctgggcaagggtgccctgaactggcaccacgatccccgttgaccgtttttgttcccttttaccaacgccgtgttccatgaggaatacggcgttttttatgtgaaagaaaaattgccttggaaaatggcgggggagaaatatccgtaaatcctgtcctttttccggatgcctgtttgcgtgtaaaatcatattgtacaaaagatgatttctcttgccagaagagtggaatagggatagcgtttgcgcgatcaggaaattcatcatgaatatgcctcttcctaaaacgacgcaaggtgtttatcgtctgtcggtcagtaccttttattttcttcagggtttggtgttcgccagttgggcatcccgcatcccggacatcaaaagtgcattggggttgaacgatgccgacttggggtccgttctctttgccgtcccggtggggcagatgtccgccatggcgctatccggttacctggttggccgttgcggcagccggaaaatactgatggcggcatccgtcttttatcctgccgtgcttgtatgcctgggtatggcggggtctttctgggaactggcggccgggttatttttctttggggtagccgcaaatctgacgaatatatccgtcaatacgcagggagtgggagtggaacggctgtaccagtgcagcatcatggcccggttccacggtttatggagcctggcgggttttttcggagctttgctgggagctgccatggtggactggcatatttctgcggaaacgcatttcatcgccattttcctgatatgcatgattattctggccgttttttccccctctcttctgccgagggatgcccggcgttcctcctcccagggaggcggcatgttccggagcatggatgcttatgtactggtcatcgggctgatcgccttcggaagcatggtgagcgaaggaaccatgtttgactggagcggcgtgtactttgaaagcgtggtaaaacccggtccggggctggtgcagatgggatacgtggcatccatgagcaccatggccctggggcgttttacggcagaccgcctggtgatgcgcttcgggcctgtgcgggttctgcgcgccagcggcatccttattgcctccggattgctcgtctccgtcctgttcccgatgctgtggtccgccacgctgggctttctgctggtgggttttggcacctcttccattgtcccgctctgctacagcatggccgggaaatcccggaaaatgattcccagcatggcgctggcttccgtttctaccatcggctttctggggttcctgatggggccgccggtcattggtcatattgcccatgcttcctctctccggtggtctttctccctgattgccctggttggactggggacggcattcattgcccctttcctcaagaaatataggtaatcactgttaatgatatgcctatattgtgaaatggtgcagcaaggcaatccaaatccgaaccgtttttgttgctgatagcttcctgcaattccgcgaaggtgatggttttcgtgccctccttgtagttgaaggtgatcaccattttatcatcgtacaggaaaatcgcattgatgaaggcgtcgatgagcatcttgcgatggcttttctgccgcacgtccagcttgcggaaacggtgaagccagaaggtcataaactccgcgctgaccttgggcttcgccagcttttcgcaggcaagcctgttctcaagctcgtcgcggcggttttccagctcctccagccgctcctttgtggagcgcgtcaggatgccctgctggatggcgttgagcagattgctgatggcggtatccgcttcacggagctgctgctcatacagcggcacgttcacattgtccctgtcctgcaagtccatcagcatggacacaatggcctcgattgctttgtcgtccatgaccattttcatggtttcaccgaccaccaaatcctcgatccattctttcctgacgggcttcttgtggcactcggtgcgcttctttttgacggaaacgcacttgtagtagtgatgcacctttcccgtgcggcttgtgccgctctcgccgcagaggtaggccccgcagcagccgcagaacagcttggttgtcagcagataatcgtcctcggccttgtgacgcgccggggcctttttgttcttcgccagcttctcctgcacccggtcaaagaggtcttgcggtacgattgcggggatgccgtccggcacgaccacatcgcggtattggaactccccgatatatcgccggttgtggagtatatgccccacgctgttgaaggtcattttccgcccccgcgtgttggtaagcccctgctcgttcagccaattcataatggaggaaatggtttctccgccgtcatatcgcttgaaggcttccagcacgaacggcgcggtcagcgggtcgatctgaaaatgctgctccgcgtcgatcacatagccaatgggcatcatgccgccgttgaatttgcacttgagggcgttgtccgtcatgccgcgaacgaccttttcggagaggtcagcagagtagtattccgcatagccttcgaggacggattcgagaatgatgccctccgcgccctctgaaataatctcggtggcggataccaccttcacgccattctttttaagcgtggccttgtaccgtgcgctgtcatagcggtttcgcgcgaacctgtccagcttccagacgatcactatatcaaacagccgcttgccgctgtcctttatcatgctctggaactccgggcggttgtcggtctttgcagaatacgcgcggtcgatgtaatgccgcaataccgtgattccgtttttctcggcaaaggcggcacattcacggagctgcccttcgatggattcctctcgctggctgtccgaggagtagcgggcgtaaatcacggctttcatttcttttccacctccgagagcatctgtacaagcgttgccttcaatcgttcgttcatagccgagccggggtcgaagcacatttccacgaaccgcgccatttcgggattgttcaggccgagcttcacgcagttgttgtagatcatgccgtggggggcgtccgtcctgccgaaaatgtagtccagcgatacgtcaaagtagtcggcgtatttcagaaaaacctccggggagggagtggaatcgtcaatctcataccgggcaagggcggattgggaaacgccaaattcctttgccagctttgcctgcgagagcctgacgctttcgcgcaaacctcgcagccgttcaccgatgattttcaaggctgcgtcacctccttttctgtttcaagtatacccggaaacagagaatgtgtcaatgacatattcacataacgccgcgattctctgacgcgccgcaggcgaagaaagctccgcaggagcgcagccgattttgcaaaaatcgttcaaaggggcttggggacaaatctccccaacaagcgaaaagtggctccaagccgccttgcttgccaagtgtgaagccgacagggttcgcacggcggcaagagcagcaaagagggccctctttgccctgcttgccacattagttcaccatgttagatttcgttcgcaggaacaggaaaaggcaatccggcggtgttccttgcggaaaccgttggactgccttttgcagcgctaaatggagttagaatcagcttagcaaccgcagtcacttcttcgcatagataacatccctgtccatgatttgcaatgcttcctgctccagaagataggcttgatatcgcttctcatttgcctccagtgcaagatcatttatctttttctgaaccgtgtggtttttgagcaaaggaatcgctatctgacgaacatgattgtcgtcaatttcgtcaacaaccgagccgtatgtaaaccgggtaataagcactttcccgtaatccgatgcaagaaagatattcaaatagccggctatatccttgtttgcaggaatgacgcggatgatatggtcagatggaatatagtgctcccagtgtttagggacaatcgcaatttttcctatcgtaccacttcttgtaatcagtgtcgtgccttcgtgtacttccaacttcttcaacatcttatcgtgctttgcggtggagaggtacttttttgaagaagggtcaagttcgcttaattgtttgcccccaattagcacccgtccatacccctcgttaacatatacgcgcttgaagcggcccggcaggataacctctcggctgatacgagggtcaccgactgtcgtcacttcctcggcataccgcttcagatgttcaatgatagcgtcaacaatcggcacatggtaggaggcatccagccgccccgccaaatcactcagtttgacattatgagcccccactgtggaagggttcttttcaagctcatacacaggaggtagatgcaagttttctattaacaactgtgtagctctgtctatcatgcgattagattcgtctcgtaatgtataagaatgagcaattaaatcatgaatttgctcgcggattgtgatgggggcatcgggaatttgtatttctgccaaatggcttggttcaatgtgagtgatgactgatccgtaaccgtttgttcgaagaatcagattgccggtttttgacttcaaaaaagtgtaaacatatcccaagtcatattccttattgaatgttatgcggataacatcatcagaaaaaatacgaccgttcaatgtttctgacacataagagacactgccgattgttccgctccgtgtcagcagcagagaacccttttttaatcgtaattcatctttgctgcaatctgccagtttggatatgtacttttccggaacaggataaatatctgtcatctgcgatggcagataaaatccctcaccatactgtttctcgcaataaactctttttaatcggcttctttgcatccagcccgggtaataagcagtttctattaaccctccctcaccgaaaagagaaattgctttatactttccagtagaaatcttttctctgacctgcttcgcttccacatcaaaggctttcgcttctagcctttttccgcgggcaacaacgtccgaaagcgcaactgcacaccacttgaccgggctctcgttgacaacgacttccggctcaatgctgtttttctctttgaaagcgagatttgaagttaccatcccaatccctcctgctttttccactcagcgaatatcgccgggacatcgggagtctgatcatcctcaacttttaccttttgctcatgtgacacagtgcgttgcccgtctcccgtttctccaagcacaagcacactgtttgtatccggcacaaggatttcgttgccctccttgtcacgcttgaacaggggattgcctcgcttgtcatgcccgaccttttcgatcatcgccataaagatgttgtagtcagccattttgccgctcttttcctcggtgtccttctgttcctgtgttttcctttgcagaatcagaacagaagtctgcgtcccgttgcggggctggaaggtatcgacattcaaatcaatactggcaacgatccgatgattttgtatcagccattcgcggatataccccaggccgggagagccgagaatcgaatccggcaacacaatccccattcgcccaccggggacaaggaactgcgtgcagcgttcaataaacaggatttccggcggcacggaggattgaaggcgcagcgttttctcccatacgcccgttttcttatcgcactcccatatatgggcaagctcaaattgctcaagaatattcttatccttgatcggaatcttgcttccaaatggcgggttggtaacaatcacgttgaaatagccgatcgagctgtgattgcgaagaacactcttgtttataccaagcgcattggccagaccggttcggaaatcctctgtccactcatgaggcggaagcagggaatttgtttgcagaatgtttccgctgccatcgttgttcatgaccatgttcatcttggtggcctttaccagatcggggttgatgtcaaagccgaaatagtttgtagatgccatttcagaaattctgtcctgaaaaactcgaaccgtatccgagtcccaattctcccgcttgataccgagggaagttgaaaactgctgctcaagctggtcgatcacatgagtcatcgccatgacaagaaaaccgcccgtgccgcaggagctgtccagaacacgctcgtcgattcgcgggttaatcatttcaacgaccattttcataacattgcgaggcgtaaaaaactcaccgcgatcaccgcggagattagcccctacgatttcctcgtaggctttgcccttgatgtcaattttggtattgagcaggctgtatcgctgcaactcgctgacgatatatgcgaggctcctcgggctgagtttaatttcgtcattggcatcgaaaatttttccatgacgtttcttaactcgctgaaagatttttccgattctcttttgaacggtcaactgtccgtcggggttagaacgctcctccgatgtcgtataaaactcaagcggattcggaatattacgctcatcctcaattttgcagaaaatcaccttgagcagttcaaagaacgcaggttgcttttgcatgccatcattcacataaatgtgattatggcaagtcttgaaaacgaataaaagattgtcgtcataagcgttttttaaactcgttctgctgggacggttgacctcatccaaattaccgtctgcggagggaatatcgttgtactccatgaatgtaatatttccggcggcatcaacagctttgcggaaaacatacttttggacactgttggtccacatgccccactcacagtttgggcaaacagacatatatgattttagctgcgcaatgccatccttggcattacgagcgtcaaccgtctcttttttgcattcgattatcaacttgattgtaccctgcgtttggtctgcacctttttcccagattacaatgtctgcgcgaggtttgtttgaaccaacctgcaaggtatattcgattctaatttgctccggcagatacttatgctcgttcacgagtcgtttctcgatagtttgccgaacgtactcttccggggtatcgttacggaatttgccgtcaatatagtcacatatttttccgtccgggattacgataatcttctgttcacttggcatcgttacttctcctttgcttattggcatgatgccaatttcattttttcccgaatgcttttgagcgcatccggattttcatcaatgtaccttgctatatctgccggcaactcatttctgccttttgccgccaagtcaaaaaatctctctctggtttcattgcttgcttgcagtatttccattgcctttaactgaagcggatatggtggtgggttagttctcccggcgagaatatcataaaagtatggcttccggatacccagttctgtgtagaatttatgctgcgttatcccggagtctcttatcagctggcgaagatactctccaaagctctgctcgttttcaaccattcttttcgcctcccaatggtatgcttgtatacatactaacatacttttttgcatcggtcaacaagatattgcaaagaccatagctcgcgccgagggatttattatattttgggggcaggcaggcacggcttgtgtctgcccgccttgtccgccaaaaagcgcggcgggcggcggcagtcaatggcgcgaagcgttcatcttgaccattgacggccgtcggctgctgcgctacggcccttgccaatctgcaagccacaaaacaatttcggtagccgctgccgaaattacgctgtcagccgcttccgttcccgtggtattgacgggcaacctggacactgttataataaaagcacaatttcagacacaggacaccatgcagacgcagacgggccgaaaggcttgacaggcggctgcattttcaatttcggataagaagggaaggatgcgaagggaaaaagcacagacggcaaaagacgctcaagacgccattcctccgccgcacgggagaaagctgcggcaaaatactttttcggaggtgcaacttgagcaggcggaaaaagctcaccaacaacagcggcatcccgcagcatgagatcgagaacatcgcccgaattctgctgccggatatcctcaccttttacgagagtgaggaagggcagcgggactttgccgaatggaaggcggcacgggacgcagcaaaaacgggcaaagacagcaacggcgagaacgtcgcctgacgatagatataagacaaatccaagggatatatactcctaaaacagcatggcaaaaggggatggtcgaccgccatccccttttgtgcgtttattcagttttcgtagggcttatactccgtgacggcgttcagatacgcctcaacgtcgccgttcagaatgaggtctgcataagccagcgggtcgttgtagatgagatagtccagctccgaccgctcataaagattatccgccacttcgttttccacggcggtgcagtcgatggagatcatgctaccgtcctgaaaccgcagctccacacagccagtgtccatgttgaattcacagcttttgatggttttcataattgccctccttatcctttgcatcctttgccagctttggttttctcggacctctgggtttggattcgggacgctttaccacgccgtttctgaaatgcgtatcctcagatttctcgaagaaaacaaataatccgaacccatctccgattaagaagatttggttcggattatattggtttggtgcgcctggcaggactcgaacctgtacgcctttcggcaccagatcctaagtctggcgcgtctaccaatttcgccacaggcgcaacgaatgggcggacgcactctgccataccaggctctggcgttcaagattaaacaggagtttttacctttgacgcgcttatgggaagcacctgtggtgagaacccataggaaagttagctgtcctgttgggtgtctgctttctggcggcattttccattcatgggcggatgtctggttccccaaaggcacatttactccggattagaagggggaggcattgaatacgtcttggtttgtctgccggtaaagaatggaatatcccagatattttcccgggcaggtttatcccatgatttgtgccggaaaaggaaatagtttcacgaacagaaagtccagcatccccaggcacagggcgatgcagacggcttttttaggggacaggagaggcgttattttcagccaggcgacgatgccggcatgaaccgccagagagatgcccacagaccaccagaaaaacggaatgcccgtcatggcgaagagggccgccagcgggtaggtgaatgccagaaagagtttcatgacagcttcccattcatgtccgcgcaccatcatcagctgcttggacagaagagagacatacaggcaggaagggactacgacgcacaggatgagggaaacgacccctttttttgcataccgttcttcctgtgtgggaatgtacatgccgcatatactgggtcaggaggggaaaattgtcaaacattgtcctagcccggcggggcgggagcaatatactgacggcattgcgtatgtcgtcttttgagttgaattcctccttcaagccttccggagaccaggagcaggccatcggcaagttgctcaagtctctggaggcgggcaacaagcaccaagggctcctgggagtgaccgggagcggcaagacattcaccatggcgaatttgattgcccggatgaacagaccaacgctggtgatttcccacaacaagacgcttgccgcacagcttcattcggagctgaagagttttttcccgaataacgcggtggattactacgtttcctatttcgattattaccagccggaggcgtatatagccagttccgacacctatattgagaaggattccgccattaatgacgagttggaccgcctgagcctgaatgccatgaattccctgatgacacggagggatgtgattgtggtggcatccgtttcctgcatttacggcctgtccacaccggaggattacaggaacctgacgctgcgcatgcgcgagggggatgtcatggaccgggacgtgtttttgaagcagctggtggaacgtctgttcgagcggcaggattttgattttacccgtggcacattccgcgtgcgcggtgaggtggtggaggtgtttcccgcttattcggaaggtgaagcaatccgcgtagagtttttcggcgacgaggtggaacgggtttctttgattgactccgccaccgggcgcgtgagggaacggcttgggagctacacttttttcccggccaagcagtatgtggccgctccggagaaacgggcggcggcgttgaaggctatccgggaagagctggaggaccgcgtaggctggtttgagaagcatgggcgcctgctggaagcgcagcggcttaaattgcgcacggattatgatttggagctgattgaagagctgggtttctgcaaggggattgagaattattcccgccatttgtccggccgcctgcccggaagcgctccatccaccctgctggatttctttcccaaggattcattgaccctgattgatgaaagtcatgtggcggtgccgcagctgggaggcatgtacgagggggaccgaagccgcaaaaatattttggtggagcatgggttccgcctgcccagcgctctggataacaggcctttgaaattccatgagtttatggaaaggcagaaccagattgtgtatgcttccgctactccggggccatttgaactggtaaattgccgtgcggataataagacgtatattcccgtgcgccgtgccgccagatccggagaaaaggctccggaagggttcaaaggaattttgtttacctctcccaaggacattcgcgttactcccagcccatccacggaaccggtagaaaaatttgacccaaccaggcgttctacacccctgattgtagagcagattatccggcctaccgggctgctggagccgaagattaccatccgtccgttgaaagggcagattgacgagacgatcgccatgtgcaatgaacgcgtcgccaaaaatgaacgcgtgctggttacgacgctgaccaagaagacggcggaagatttgacggagtacctgagaggggtagggttgaaggtatcctatattcacgcggatgtggatgcgattgagcgcgtggagattttacgtgccttgagagccaggaagatagatgttctggtaggcattaacctgcttagggaagggctggatttgccggaggtttccctggtgtgcattctggatgcggacaaggagggttttttgcgtaatgagacgtccctagtgcagacggcgggccgcgccgcgcggcatttgaatggagagtgcgtcttgtttgcggatgtgatgacggattccatcaaacggctggttgagctgacggattaccgccggggtattcaggaaaaatacaaccgggaacacggcattgtcccccagacggtgagccgttccgaacaggggcaattgaagttgtacgcagaggatgatgaagagtccttccgcgtagcggaggatgaagccgggtatggtctggaagagcgcattgccaggctggaggcggaaatgaaggaggctgcttcccatttggaatttgaacgcgccgccttgattcgggatgaaatcagacaaatgcgcggagaatatgaaaaaggcaggggataatatccggcgtgatgaattggggatgacctttctggtaggatggcatgctgtttttccgtgatatttgtccatcttattcttggtcgtcatttgacggtgatttagatatttggtttaacagttaattgcttaaagaattcttctgatgtgacgtcagtgttccggaccggagtccgctgtcaacgtgaaatattctaaggaggccttacaccgatgggggagtatatgaagagctctttgttccagtcttttcttatgtataagaatttctcatgataagcacttgccgaagtggcagagggtatggcggatgacagaggattcccaggctggcagcagtagctgtctgatcgtcctttgccggttatgttccccattttatttcttgatgcagccggctgcgtcaaaggcgccgggcaatgtatggtcaggaggggcccatttgccatcgtctgaaaaaaagatttgcataaaaaatacttgcgtatttggaagaagcctgtaatctccttccaccatgacccgcaaaggtggtatcaataaaacccgcaaggcagtcgccaagcgtttcaaggtaaccggcacgggcaaggtactgcgccgtaaacagggcaagcgccacatcctccagaagaagtccagcaagcgcaagcgtcagcttggcaaggtggctctggtggacgagacgcaagtctgggcagtcaagcagaacctgcctttcgcctaaaccgcggaaacgctcgactaatgccgagctttccccccgctgaacggggggccttcatgcagccttcttccgatgagaagataagaacaggcgagactgcagggaggtgaggaagaacagtctgttcaagatagaaatagaaataagctatgccacgtgccactaatggaccggcctctcgcaagcgtcgtaagcgcattctcttgcgtgccaagggtttccgcggtttccgcagcaaactcttccgctacgccaaggatgctgtttacaaggcttggcagtatgaataccgcgaccgcaagcgtcggaagggacaattccgccgtctttggatcgcccgtatttccgctgccgtccgcgaccgcggtctgacctattcccgctttatggaaggcttgaaagccgccaatatcgatttggaccgcaaggttcttgccgatttggccgtctctgacgaaaaggcttttgacgctatcttcgctcaagcgaagaaggccattgaagccaaggatggcgcagctctccgcgcctgaatgtgcgggagtttccatctgttcagtaaacgttaaccgacagcctccggaaaattatttccggaggctgttttcatgtccggacataacagttccggacgttggcattttcctgtaaatgccttatgaagcaggtgttcgcacgttcatcatttagtgcgccagccagtttctcttattgctgcgtcggtttttccataccggctgggaaaaatcctgtttccgccagtgcgcatttttgttaagaacacaatggtgctttaatcattgcttccaattctagaggcatttattgcgaaggctgttcaggggatccggacagaaaaacgggctgcggtgtttgatgctccgccggttttttctcctggtagaaaaaaggcgcttttattcgtccagattccggactgggatgatgatgccgcctctcccagaggtaccgctcgaaaaaagggaacgcggtcttttacttgcggcttcagaattcccggaaggtaaaggctgttttttggtctgccaggcaccttttgaaatccatttggaacatcagcattcactttgtcattaggacatctttgaagcttgttcaccggagagctccgtggtagcttggacggcaaaaactaccatggatagcattctttccgtccttgccaccatcgccattattttcggcgtggtaatgttgtttaacttcatgatttttattcatgaacttggtcattttttcgctgcccgctggcgtggtctgtatgtggacaggtttcaaatctggtttggccgtcccatctggaaaaaaacgattaacggcgtgcagtgggggctggggtggattccggccggaggttttgtttccctgccgcagatggctcctatggaggccattgaagggcgtgcggagcttcccaaggatctgaagccggttactcccttggacaagatcatcgtggccgccgccgggcctgccgcgtcttttctgctggctgtgttgtttgccgtggccgtctggatggtgggcaagccggatgtggagatgggcgtgactacggtcggttttgttgctccggacagccctgcggcgcaggccggcattcttcccggtgacaagattgtgaaagtggacggccatcctgtggacaagtgggcggggaatatggaaggcgtgcgggaattgatcatgctgggcgagcatgaccgggtggtttttacggtgcagagacctggaaatgaaggagaaatggaaatttcctgcggattccggattccggaaacgtcctggtggcagcgctccggcatgcgtcaggtgggattgatgcaggccatgccctgcgtgattggggaagtgatccccagttctcctgccgccctggccggattgaacccgggcgataagattacggccgccaatggagaacgcctctggaaccctgccgcactggatgttctgctgaagaagaatgaaccgctcttgctggatgtgacggacggggccggagttgcaaggcaggtgaatatccaggggaaacttccggagaattggcacaatggtgcggacggttccctgctcaaaggggcccagcctattctgggcgtgagctgggacctgagttccgtgggccgtgacgttaccgtccatccttctccgtgggcgcagatcaagcagagtctgaaatggatgggggataccctggcgaaggtggtagctcccggcagcagcgtgggagtggagcatctttccggacctgtgggcattgccaatcagttttataagatgttctctctggatgaagggtggaagctggccctgtggttttccgtggtgttgaacgtgaacctggcggttctgaatattctgcctcttccggtggtggatggcggccatgtggtcatgaatgccgttgaattgattttccggcggcccctgaatacaaaagtcctggaattcgtccagttcggctttgtgttcctgctgatggggttcttcctgttcgtgacattcaaggatgtgggggatttctttggcaagaagccggacaagctgcccaccccggtattcaaggccgtcgcggattagttgcggacggcgttttttattccggcttgttccatgaagcagtcactggcggcgcgtttcctgttccgggtggtggtgctggcgtttcttgtgtatgccatgctgcttacctggtggactcctttcaccggggacagcttgatgcattccgtgttcggggcggaccaccgccttgcctttcagcccgtgctggagcggtgctggtggtcatacatgcactggaatccccggctgggggaattcctcgctatttttacggctacggcgggaaaatggctttttctggccgtcaatcccttcgtgcttctttccctggcgttgatgatgtttttcctggcgcagggaagaagggtcaattccggaaactggcgggatgtgctgctgtttaccgtaggggcgcttcttttgcttacgtcttcatccaggccgggcatcacgatgttctggctgtccggagggaccaattacgcatggtcggccgccatctggctgggtttcctttgcctgtaccgctccttatgggcaggaacttcccggattcgggacactcctttttcctggttctggataggcgtcacggcgtttgccgccggcatgacgaatgagaaccagattcccgcttccttgggcatgctgttcgtgtactggttttacgctcgcagccggggaatggttctcccccgctggttcttcattggctggggattccatgcgttgggaggggcctttcttctgctggctccgggcaatgccgcccgccttcattcggaaacggcgggcggcgctgccgtccttcattcctggggagagcgtttcggcgctattccagaactggtaaacgccttttatgaattcatgccgattcctaaaatgttgctggccgttgccgccgccgctctgatcctgctgactgtgaaagcggggatgaaaatctggcggggggaggcagggcggcgcatgtgcgcctccctgctgtttattctggtggctcatgccatggcaatcagcttttttgtacgtgtgattccggcatggcacgccatgttttccgctacggtgttgatgatgacgggcattctggggttgtacggagtatggatggaggctgtgcaaaggcgctggattccattctgcgtgctgctggcggcggctggtccggccttgtgggtatgctccggatatctggatgcttttccccgtatccaccgccagtgcgaggaacggaacatgttcatccgccgtgaattggaacaaggcaagaaaaacattacggttcctccttatgattccgtgccgttggctccttatgtttccgtgatgtggcgcatgagcagcggggatccggatgaatttatcaatcgttccatggctcggtatttggggattgaaagcatccgggtggctgttcctgaaccttgacggcttatttttttgccgttttactgatccgtttccgggcggccttttttatttagataccggctaatgtccgcggatcaacaatccggtgagtgccgggttgtctcaataaaaatccattttattctcattaaacatgttatatatttctatcatcttgatggaagatgactgatgccataaaaaataaatgtagtatatgattaagttttcatgatttccattgacaccggattgttgaaccggtttactctcttttgtcatgaagaaatccttattttctttagctttgatcgcgagttccctgcttgcagtacaggcggcgacggtacagattgatttcggacgcagtgacgccacgacggaaggcgcgctcaacatgaattatgataacgcctccgcctctttgggcagcatgccgggaagcgtttctttggcgtggagcacggccggaggatatgtatcggaaaacggttataccaccaccaagacggcagaggaagaagccgattggaaaaatcctttcaacggcagcatgcctttcagcctgggggacacctttcgtgacggtcttttaacgcaaacggccgatggttccggttatttcaccgtaacgttcagtggtcttgccgccggggaatatgccttgtccatctttggaggtttcacaggcaaggacgtgtttgccggtcagacttggatgatcggaaacgccgatgcttccaatgccgtgtggacaagcttcggtacagatgccagcgggaactgggccgaaatttcttccgtgacgggagataattccggcgttctgactccgggaaatgctggaacttccagcgctaccgccaataaagggctttattcctcggtggagaacattgtcgtgggggaagacggaacgcttacccttacgattcaggggaatggttccagctcttacggccggacggccctcaattatcttgccctgacgcaggttccggaacccgctacggcagcattgagcctgctgggcgctgctgctctgttcctgcgccgccgcagggcctgatccggaaagcaacaaagccttgttatcaacgccgctcctaattcacacggagcggtttttttatttggcatttttcctcttcctgtctgtgcggcagggcatttctattccagcctgttttccggattcccctttcccatactggaaatgagcaggaataggagtgaagcgcgggaaaatacagggaaacggatttgtccggaaagaaaggcttattggatgggaacggtttcctttaagcaagtggaaacaatgatgcgcgttatgcgttccagcggtattccggtgattctggacacaatgcgggcataagcattcaattggtttgagtggcgctcgcgcagttgttccggggattcggcatgatccgtcttgaagtccacgatgacggcggctccgtcatcaagaatcagcctgtcaatgatgccggaaatccagttgttcccgtcaatggcttcaatacgctgttccttcatgatgcgcgccgtttccggagacgtgaaaagtccgcggatggatgggatttccatacactccgctacgatgcgttccgcctccgtagcagggtggagagcccactccggcttgttttcatcatcccagcgggtaatccgttcaaacacggcatggacggcggaaccaagcgcggcggccttccctgcgcccgcgtgtttttctccccggagcggggaggcttcctccgacaggccggagggggatatccgttctctggccaacggtttttgcgtcggccattccagcgcgctttcctccgcgcgtttttgtatgatttccgggaattccgcgtaccacccttcaagaccgcgggagtacaggcatgacgctccggattccggaagtatgtcttccgttccccggttgagggaccggatagaggaacggaccactttccacatggaatctgccgtctcttctcccttgtcttcccggtacgggaggataacgtaggtagcccgcttggcccgggtaagcgccacatacagcttgcagaatccgtcgaattgctgccgggcgcgccattccccgtaaagttgccggaattgcgggatattcgtatagacgtgccgggagggggccaggacaatgccttccattctgtcctcctcattttttttgataaaatgggtcagatgccttccgtccgcaaaaggtgtgtctctgccgatctggggcagaatgacaatgtcaaatcccagccctttggatttatggatggtcatgatgcggacaattcccgcggcgggatcttcccgccgggtcaggtcctccatgcgcctgatccattcatccaaggaaacgccctgttcgtccacctgttccgcctcattctgccagacggccagtcggtcgcggtggaagtccgtcagttccgtccctccccggagcagacgccgttccagttcctccatgacggcggcgtaaccgtcccgttccagcaggaagcgccattctttccactccatgctttccgggcatcccggcgtgatgaggggccggagaggggagtgggtgagcaggccgacgacaaagggatctcccggcatcagcagccagcggaagaagtacagcaggtttttccccagcggagagtccacgcctaccggaacgtcgtcacacacttctgcggggatgccgtgatccgtcagccatcccttgatgacaagagcctggttcttcgtactgaccagtatcgctgtttccaggccgcggcgcagggctcctgtacgctccagaatatcagccgccgcctggcataccaggtcattggcagagacgttttccgtcttgggcgcctgccagatttgggaggcgccggggcggccttccagatggggggcgcaccggtgctccggatattccccccattgttccagggcggcggtttcgcacccgggcgctgtccgggcatagtcgcaaatatcgttgaccagatccagcacaggctggacggagcggtaggaagtggacatgccgcgttgttccagttgaagctgtgaagaaacggagcggaacagctccgggtctccgccgcgccattggtacacgctctgcttgatgtcccccactacgaaaatgctgccttcatttccggccttggattccgccagatcatccaggaaaggcttgatgacgcgccattggggctgggacgtatcctggaattcatccagcatccaatggtcgtaacggcagtacatgcggtattgcagatcccgtttaagttccggcgtaatggtgccccctcccagcatgcgcgtaacgtcgtggaacaggaacctccccctgttgcggaccagggaggagtatttgccctcaaacaggagcatcagtccgtgcgtggcgcgtgtgcggcgcagcgtgtgcagggcttccatgcgcagccagctttggatgagtttttccagagcaggcgtccagaaatcccggaatttttcccgtgcctcttccacggtaatggcccagggggaacctccctctgtgcggaagcgaacgcggcccagcctggcgtattgggaaaatccgttcaggaagcgcaggaacagttctttgttttttacgccgtttttcccttccggcgcaggagtttgctgaacctggaaaaccagggaatgcagtacggagtcaaattgttccaggggaacgggaggcgccagctcctccagtgtgaagcccagcgtgacggggtttccccacatcccggcatccggcacatccagaaaaagttcgtgataggtgctcaggcggcgcatcatggaattctccgcgtccgcggcttccgcgtcagaatccgccccggaaaggaaggcatcttcaaagtccttccttcgctccctgtttacggagcattcccggtacagggagagcagggcttcacggcgcgccagtttctccgccgtggggtcaatcatgctgaagccgctgactcccagttcaaaggcgctggcggaggcaatctgggcaaacaggctgtcaatggtgcagaggttgagccgcgccaaattctgcaccagaatgtgcagtaaatggaggaagcgttcccgatgcaggttttcctccttccatgcctccggagcgccgggccagaggccgggctccccatccgttcccttgatgaccgcccagagccgttctttcagccgcgctgcgcctgcctcatccgtggcccccgcggccaggtctgtcagaatgcggtccttgaattctcccgccgctttgcgggtgaacgtaatggcgatgaggcgttcggggtggttgccgccgttcagcgccagcaatcccaggaaacgcagggagagctggtaggtttttcccgttccggcggaagcggagatcaacatgttggtcaggggcggcatcttagaaaggcaggtggggggtgaggcggaggcccaaaagatcctgcaggctttccctccgggaagtcatcaggtccttgaatacgtcataagagggcggtggccagcccagttcttccgcggtgatgagcccgcggccttcataaagaagcttcatcagttcctccgcccaggaacgggcgctgtccagcgcgcattcctcatatccgggcatggtgtcgtggagggtgtcccaggcggagattccgatatccatgggattggcgggaaggttgtaataggccgctgagggagcgccgccgtaggtttccgaggcccacagcacataaacgggaagctgcaggtctttccagcgcgcgtgcgccagcttcccgtttttccgtcgtttggtgtagggatgcagggccggggaaagcagggacagggcgtccggccgtccgagcggttccagatgctttttttcacaggaggaggccgctccggttttgtaatcaatgacccgtatgcgcccgtccgcatggcggtcaatgcggtcaatgcggaatttcatggggaagccgcccagtgtccagttctctacctgacgctcaaaggcaatgcaggaccatccttcctgaagggcctgcaagtgctgaacggcgtaaacggaaagcctctgttccatggagcgtttttgcagcagcaggggcatgaggggggaggggccatattgtttccggaaggtttgttccagtatttccgtgatgacggcctgaagggaagctgcgttcatgccgtctttcaggacggcgtgttcccggcagaagcattccagcacgtcgtgcagcatggtgcccagttcattggcggccatatcctctttgtccggcaggaattcttcctcattcatgtgcagcgcctcctgcgtccagaaacgcatggggcaggacaggaaccttttgaggacggagggggagaagggcttccctctttccttccacgggtttttgtagccgggcgccatcgcgccgatgtccgcagcggtcttccagccttccgcgggttgaagatgccagttcccgcgctggtagggcaagggcgcgggcgcatcgctgatttcctggaaaagcagttctacgcggcgcggcagctccgcctccgggcagcgcatgagcagggaggatggggtcagaggatcattcctgctgctggtccgggagagaaggatggtgaggctgccttcccgttcgcgggaatggagcagggcggtcagcagaaaactgtcccgggctttcttccggttaaaggaatcaatgcccagggtttcccgcagttcctccggcatgaactggtcggaaacgcctccttccggtacggtcccttcgtttagtcccgttagaatgaggtctttttccgggcggaagtgaacttccatccagcccagggaatccagcgccgcatgagcttttctcctgtttctgacgcgcagcggctggaggcatttcatcaggagcagaagagccgcctccgggctggaaaacgcggtggagcgctgttgcagacgcatgagtccggaaaggcaagaatggaacatttccatggcttccgtctccgggccatagatggttgccagggccgggaaccattccatcagccgttcccccagcattcccggttccgccatccggttccgccattccagaatggcctggatggaaggaaaggcttcgggataagcctctttcagcctggaaagcaggtattcttccgtttccggaaggtatttctgctggattttgtccagcgcggcgcagcaactctgctgattccttatccccagggaggcgcagagcagggaggagcgcgccaggtaatagacggggcgcgccgtccctttttcctccagcgcccgctggagattgcagagcaggtccatgacgccgcttccggcaaaaggcttcccttccggattgtggaggccccagccgtattggcgcagggctgcgtccagggcgacgttcatgtcaggatcgcaaacgcccagggcgatgtccggtgtttctccttccgctgtgcgggcgatgatgcggcacgtttcttcagccagccgtgccggattggccgcaattttgatttgatcgtcgcggattttgatggggcgccgggaccactcttccggcagagggcatccccaggaatcaaaggaggcggcttcttcctccggcgcgtggatccatatctggacgggtacgccattgctttccgcatgccggagggcatggtgcagaggggccggaacctccgctgcgcaggccagaataatatttccacctgtttccctcagggagttcagcagccggggcggggcttccgccttcatggaggttctgttttcaagcttccagctttccagttgttgcgtgcattgttcttccagcctttccatgtccgtccagcgttcgtctctgcccgcacaggcatggtgggccatgatgcaggaaatgccctggttcgccatggcgtgcctcaggttttgcaggctgccggccatttccagcatgctggaaaaatcctccggcatggcgcgtggaaacaggcggggataaaggcggtggggagagtcccccagagccaggagccacccggccagttcttccggagcggacgccgtttcttccttttcttccatccggaggaactggtctgccggaatgacctggggagcgaaggttgcctgtgtacgggaaatggaggcgaggaattccctcagctgcctcccggattcccgtgtgggaaccagcaccagatgccggtggaagtcattttccagggaaagcaggcgttccgccacagcccggcaggccggtttgtcccaggatagaaagaatcggttcatggcagggaagcaggaatccccggaaaggggaaaagttgagggcgacatgggaatgctatatcagaatggctgaatttcccatctattttttcatgattaacggggcggcgcatggcgtgccgtgaggtgagccggcattggaccgcatgttgacggcgaagagaggaattgttttgcctttccggcagggcgtggcggcggaaatccggaggaatggcgtgtttattgttcctggacggtccgttttcccccggttccggtgaccagaagcacgcctgtgaagaccagcaggacggagagggctttcatccatccgaagtggtccatgccccacatcaccgccacggatgaggcgatcaccggctggcagtaattgtacatgctgacggcggtgggtttcagccgctgctgggcgaaagacaggcagatatagctgacaaaggtagccagagccaccacgtaggcaatgcccagccatgtttgcgcgggcagggcggaataatggatggaacccacttcccggaaggtgaagggaaggctggcggctgcggcatacgtaaacatccatttcagcagggtgacgggagagtatctgccaatcaggttcttaaagaagacaaagtaaacggctacgctgcactgggaagccaggcagagaatgtcccccagcaggttgttgtctcccgggagggccgccgcacgccctccgctgccggaaaccagcagaatggctccgatggcgctggcgcagaccccgatgatttttttccccgtaatcatttcccggaggacgaaggctgccagaatcatggtcagtaccggcgtaatggtggtgatgatggccgcatccgccggggaagtgaaccctacgcctaccgtgaaggccatctggttgaaaatgatgccgaacagggaggcataaaacaggggcaggcggtgctttctttctataggttcccctggcacgaaagcggaggccagccagaacaggatagccgctcccagtaggcggaatgtggcgagagaagcggagcttacttctccctgctgcatgaccagtttactgacgggagacatgaggccccagatgacggccgccgctcccatcgcgatatgtcctttcagcgtttctgacggcatggtgcggcccgctgcgcggcgggtcgcacattctccgcttccgcaagcggattgcaagagtttttcgtgcgggcagggacgcggaatacagggataacgtggctatcttcttgtttgttctacgaaaaggttaattatgtttacaattttcgatagtgtcctctatctaagaattctatataccctttgtcgcgtaaacgctgtagttgttgacgtatcttaggttgaatgaaagtatttacaggatgttttgcttgaagttcttcagtaaataaatacatttcattaagtgtaaagtctttgttggggattctttcaacgcaggcaagaacatccataagccatcctcgactatcaaggttttttgttaagagtgactttgtacgtttgtattttgcaagaatttcttctttctcaattacaatagagtttttgatgatttgtatttttccattttctggtatttcactcaaaaggatattgcagcctgcccatcccgctctttttgcatttgctgagagaggaggacgtttttcaataatagcaggaataaagaaatggttaggaattagccaaaggttgtttaccgctccatttgcatagttcataaaaaagaagtttggattgttatatgattttatccggctaatcatcgtgtcataggctccatcgtttatctttttgcttaatattccattggaacttttaagactttttagttcaaagtccgaatggcagcaacaacaatagaagtcggcaacaggtttgttgttttggtaatgattcaatacagagtgtccacaaatagggcaaaacatattgcgttctacccaatcttcagttagtcttcttgctatttggctatggtttttgtagccttcagtcacattgttattgaaaaataaattcatagttcagaattttggctgtaaagatacgaaattatcttctacaacataatttaactaatgatttttttaataacaaaaattaaattatgatatttttgtaattatataaaattattgttatttttataagaatgtgaggtatcagatgcaaataatagagagtttgcaaaggttattgatcgtttctgcaactgaggaaagcggaactgtagaattgagacttctttattaaagataaagaaaaatataattagtgtggggaattttgagacagttgattttgctattcgtagttgcaagattcacttttatgatcatcgcttctactgatgattttttgtttttcttttcttatttgttcgacaagaatattaactatataatatctgccctttttcggatatgtgttgatcgtggcgtttttgccccgtgctactgcggatgaacattgttctgttcagcaggcatggaaatgccgattttatgttcccggctgttgccgcggagttccagggcgtacatggcctcaatgacggccggaagggcgctgaagcgtcccggacgttccgcgcgcaggcggtggctgatctggtactggcccatgggcagggaggaaaggaagaggcgtatttcctcatcccctatttccctgtagccggaaacggttcccagccgggcgtagccgctggcggtttcccgggattcgcagcctgcgggcttggggtcccggagcatgaggtattccacgtcgttcttcgttttcacggtcatcaccacttcaatggtgtcgccgctggcaatgacgtctccgtctttcaacagcgtgcgccgtgtcaggtctctgccctgggagacgagctcccctgcatccgtctgggtgtccttcacggaaccgtctttcaccgtttccttccggatgcggtagtaggagcgttccacggtgacggcattccccgcggcgggaatgggatcttccagggagaagtagctgagggtggcattggcataaattttccctctgccctttttcctgcggatggtgatgacatggttgccgtccgtcaggtctttcccgctcatgcggaaggcgttgtcaaaggtgaacagggtttctttcgtactggcgattgttttaaccggaacgccgtcgtacaggatttccgcttccatgtcctccatgccttccctggtctggagaaggtaggcggacaaggcttccagacaatccgccgtatctttggtggagtcccagtaggaaccgttggcgcggttgtcgagcagccattttgccaggcgcgccgtgacgggattgccggggtcgctcttggccatcagtttcaggtaggccgcctgcgtggccgtgccgctgccgtaccaccgccaccagtagccttcattgggaaggcgcagccaggcggtttgcagggagtcgtcctgctggaggaactgggaaatgatgggcattaccttcttgaagtcgtccatgcggtgggcgtccagcaggatttccgccagttgaatctggctgatgacgggaagttccagcctgtcgcggaacaggtagcgttccatgggaaggtttttgacgccgcattccgccaggacggagtaaaccagggcgtccgtcgcggaggccatcaggcggtaatcccccagcttgcggatggcttccttctttttcggtctgtccggcagttgttccagtttccggtattcgtctcctttttcaagaagagctgtctggcgttcctgatagtttttcagccagcggacggctttggaaagcatcccctccgggacattgaccgtgtttgaagcaatcttcaggccgtgcgccacatgggccgtcatgacggggtccccttcgctggctcctccgaaccatccccaggaaccgttggagagctgtttttcccggagggaggagattcccctggcggccatcttcttcagcgcggcttcatcataaacggggttgcgttccagcttcttcatgacgctgtcatggaaggccttgtccctgatgtcccggggattcagattgcgatggcttgtcagcgccgctccgggattcaggccgagctgcttgagcgtgtccatgacgacgagagcgggcaggaaacggttaagcgtctgttccacgcagccgtaggggtattccgccagataaggcagagcttccaccatgctgagggcgatgctgggggagaccttgacgaccagttcgctttcctccctgcgccgctgctgcggcagggaaatggagagcgtcttttcctgttctccggagagcactgcggcgctttccgcatggagctgcttcatgccgtgcaccagtacgggaaagttcatctgcatggcgtctccggtaggacctgacgccgcttccatggcgacggcggcggttccctccctgacggcggaggtccaccagttgacgaccgtctgcccctgggcgggaacgtccacttcccgcgcggctgaattgtccgaatctgcggaaagccccttcacggccggagcgtcagccgggagaagttccagacagccgtttttcagggaaatggaaacgcgggcgcggacgtttttgtccgtccggttgcggaccagggcgctgagcatcacgacatctttttccacaaagaagcgcggggcctgcatgctgaccatgaagtccttcgtggtcaggaattccgcggaagcctgccccacctgcaatccgggggtgatgacccaggctgaggctttccaggtagtcagattgtccggcatttccacagggacggcaacgtttccttcttcatccgttttgagcgtgccgcaccacttgatgcagtccgcaaaatgggtgcgcagttgaatatgcggggaaccgttttcctgtacgtccgcatttccctgttcggctgcatgggaatcactttttgcgccttccttgtccactgccatagccatgaccggagcggcggcgggggctgccgctcctgtagccaatacgcggcttgcggcggcatcagcgccggaatcgagttctgcctccgcaaagccgttgacggttcctttggcctttctcaccataggtccgtaatttctgtagagcagggattggaaatagggctggtccggaccgcggtcctgctgcgttccggaagccgtcatttttttcaggctgaggaagccggtttcgttcaggctgccccatacggttttggcaatgtccgtaatattggggcgcgcaatgtattccagagccttgtcataaatggccagggagacgacgccgtttctgacgggggtgccgtccggccccttgacctgaatgctgacgttgccttgttcaccgggccggtattgggatttgcccggcgtgacggcaggttccagaatctgcccggagggcggaatcagcagttcggcggaagccgtatgaagttctccgtttctgacggtgaaggcgttgacgcccatattgggcatgtcttcccgggtcaggcggcattccacaagggctgtctgccggtccaggggaaccaggctgcgggattcgtttttccaggagtttcgcaggaaggtccagacgcgggcgtccggataatcagaggtgacgagcagcctggccgtatctcccggagcgtattcctttttgtccggagtgatggaaaggggattgattttaaaaggattctgtttgcccttgccgtaggaaaggaactggaaggtctcttctaccttgttgccgtgcccgtcctccagggttgtggaaagggcatacaggccggattccccggtctggaaggacagggaggcttccccatcttttccggtggcgatgtcccaggtttccagagtttcccgtttgccgtccgcacggatatgccgcaggacgcaggttccccttgcatgggcaattttggtgccatccgccgtggccgcggtaatggatgcctggaccggcgttccggcgggggcatagccgcggttcagggtggtgaagatattgaacggacggaacgtggcaatgacctgtccggaagcggcaacttcccgcagggaggcgtccgtcacgctgacggaaacgcggtaggtgatgttgctggaggggaaatcccgggcatcctgcgccgtggataattctacggatgcttttccgtctttgttcagcggcactgtcttttccaggatggtcagaggcgcatccggggaaaagggaatgctgtacgggctgaaagacctgtcgtacagccagctccatttccagtaaggcgtccagacatccgctcccagcgtccgggtaatcgtgatggttgcctttcccccgcttacggggccgcccgcgtaataatctgcctgaatggcgacgggaatgggctgacccagccggactggtttggcgggggcttccattctgacggagaattccggctttttatactcttccatccggaaaaggggggcatacagccggaaatccgggtctgcggagtcatgcagtttcagcttggccccatactggcccagcggggcgtccgcaggaataagcagttccagttcaaagctgcctgtggaatccgtcgtgacggtttttggagggaaaatgctctcatcccctgttggggaggcaatggtcagcgtcagttttttcccggcgcagtcttttgttccgggattcgcgatgtccgggcggaagaggacgcctttgaaacgggccgtctgtccggggcggtacacgggctggctttccaggaaaaagcaggaataggagtcggaggccttgttggccgtatccatgaggtaattgccggattcccagccgtagtcagatattcccgccagcacataactttcccccttggaagcgatgcccaggaacatgttgtaggaaaaggcgctggaatcgcggggaggtattgtttccaccatggctccgtccttgtccgtgatcccctttacctggcgtttttggagcgttttatcctgccggtagcggaggatccgcaggcttcctccttccacgggcattcctgttccggcgtccgccaggaaccagagattgccttccggaacggaacggcgtaccagcaccatgtctgacagagtgagaaagcgatggaaccggtagccgttttccagggtgacggtaagcagataccagccgggcttacgggtgggaacgggaatatgggcgatgtggttcaggtgctggtccccgggagtcagggctatttcctcccccttgatttcctcccccagatagcgggcacaggatgggtcatgcagcagattggagagcaggtttcccaagttggaatacccgtttttgtaagcttttcccagcgttttggaggtctggatcttgtccatgcgctcctcctgccaccgcttcatatctacggggcggaccgctacgcaagcccgggaggcattgcggtaggagaaggagacggtcaccggttctcctgccagcagcgtccttttatccgtatcaaatgtcccgttgggttccgtgatggaggcgatgcgtttcttcaggttgtccgccacgttcagaaattccttcctgtctttcttgtcccaggattgcgcgttccagttctgaagggcttttcctaataactgcgcggcggaaggcctctggttgcgggccaggaactcgtccgctgccagatgggcggcgttgatgtaatcatccggctccggagttatccggacggcggaagcaatccggatgaaatcgtaatccgggggaagggtggcgagcaggaatttgccgttgcccgtccggtcggttttaacgacggtctggttcgtttttaatttagccgggttgatgcccgccaccatgcccgcattgccgggaccgtacacgaattcctgatccggcgccgtattggcataagagaacagccggcggcaccagaatgcggtgaaataattgacctggttggccagttccggattcgcctgaatggcggcgtccagcagccagcgcatgcgttctccgtcgtttttagccgtctcccaggaggaagaggcatggtaaaagacgacttccggcttccccgttttggcattgacctcgacgggcacggtggcgacgttccggaacgggggggcttcctccctggcgacgtaccccggcagttcctccaggctggtgaggttccccagggcggcgtaagcctggaaaggggaaggggaactgtagcggctgcctttcaccagcaacgcctgtgccgtgatgaagcgcagttgtcccagaagtttcatgttgttgtccttttccgccagccgcatggccttgacaaggcaccgcagggctttcacgcggtcccttgcttctccggaatattccccatcccatggtttggcgccgcggatataggcgccgttcaccagtttgaacgtatggcaggcgttctggtacaggagcgcggcgtccatcaggaaatacgggttgccgccgtgacgcttcatctgttcctgcagaatggaatccagattgatggaatcatccagggcattgagacgggtaagagcctggaagtaaagaagcagatctgtcccgctgtattggtcgtcatattcatgaagttgtttcagagcctgttccgccgccttcttgaacagtcttttacccagaagtttttcaaggttttcaacagcttgcttcctttgctgcggggaaacaggggaacttttgacttccgctggggcatgttgttgcggaggggtggaggcgtccgccggagacggcattcctgaggccagcaatcctgccgccagaaaaagagcggaaaagaatctgttcattccgccagactacttccaagtaaaatctttggcaagttgcaagtaggctgcgggaaaagggagagtgtcttaacgctgttaacaacaccgggaatgctggaaggccgggaacttcatgaatggatgttttacccctttcgtcatgcgtgctgaatgttgctgcaacccagtctgtagatggcctggatgtcccggacatccagcttttccaggcttccgacggggccgcgtacactgacggcctgttccgccatcagggggaaatccccgggaaggatgtccagctcctccatagtcgtcgggagccctaattcccggtaaaaacgttccagacgggaaataccttcccggatgatggcctccggttcccggaaagaaccttccacacccatcacattcacggcgaattgcacgaatatttcctggtgtttgggggaaacatacttcatccaggccggggtgacgacggacagccctgcgccgtggtccacatggtacagcgcgctcaattcgtgttccatggcgtggcagccccagtcctgttcgcggcctacgcccaacaggttgttgtgggcgatgtttccggaaaacgcaatctccgcccaggcgttgtaatcattcagatccccgttcaggatgcgggcgtttttcatgatggtgcgcagagtggcttcacaaaggctgtcggaaaggtccgtatgcagggttctggtgaaatagcgctcaaaaatgtggctcatcatgtcgctgacgccgttggccatctggcggcgcgggagcgtgaagaacaattccggattgataatgctgaatacggggcgcagtttgggggaaccgtaccccagttttcttctggtttcttcattggtgatgaccgtattcgggctgctctcgctgcctgcggcgggaatggtcagcacggtggcgacgggcagagggttggactgaggctgttttttggaaaggtatagttcccatacgtccccttcgtagggaacgcccagcgcaatcgccttggcggaatcaatcacgctgccccctcccacggccagcacgaggcccagaccgtgttcccggcagaggcggatgccctcatacaccagggggagcgtggggttcgcctgaacgcctcccaattcttcatactccacgccggcggctttcagggatgccgtgacggcatcgtaaagaccggaacgtttgatgctgccgctaccgtaatgaagcaggatttttttgcctaacggcttgagaagggttcccgtttcatggtgggtgccttttccgaaaataagagtggttttgttatcgtaaacgaagttgagcatggcgggaatgatacggcaacgctacggcccttccgcccccttctcaagatttttgtatggcctgttcccatttccaggaggggatgctgttccggaggatattctctcatgcagtggttctgttcttctctgttttttcatcattggcacatctggacggggctttctgggggattgttttctttccgttgttttttggcgataagattcagcggaaataactctctgcgggagtggcggcgccttccggccccgagggggcagcggaagacggttatttcattattctgggccgcttccggcaggtaatcggagcaatggctgtattcggccagggatgtgcggagaatggcggggaaacgggaagttgcagaaatccgtaaaaattatcctggtgaatactgttcgaattcacgatgcatggcatactcctcctgctttttgcttgagcgcggaggccttcccgtttattgtcacgcacgggccatgtccggtccccgtagttcaatggatagaacgggtctctcctaaagactagatgcaggttcgattcctgccggggacgccacccaatattattcagagccttgcatcagcattaaaaacgcaaggattttgcctctcttgtgcgaggtatcgtcatggttgattgaatggggaatggttcaaggggaaagcaggtatccggattatcggcgcccggccggagagggcgaataacttggaattcatgtctgattggaaacaaaaagcaaatgcggaagaaagattgcagacagcaagaaaatgtgctaaaggctgccggagaagagcctttggggcggaacattgtgcttcgggacatgacaggcaggcatggagcaatgtttcccagccgtacaggggatggatgaaagagcgttatgcaataacaaggacaagaagatggaggcaattaaaataatccgttatctgtcgcccgttggagaaatgatgattggctcatatggcggctatctttgcatttgcgactgggcgaaggaaaaacgccgcggcacgatagaccgccgcatttgccagcatctcaacgctgaatatgaagaagggacttccgaggttattgaacaggcggtaagccagctccgtgaatatttccagggggaacgcagagactttgatatacccattgtatttaccggatcggaatttcaaaactcagtctggcatgaattgatgaaagtcccttacggttccaccatttcttatgcagagctggcgcgccgcattcatcatccgagggctgtccgggctgtagcgtccgctaatgccaccaaccccatctccattttcgtgccctgtcaccgcgtcatcggcagcaatcagaaactgacaggttatggcggggggcttgatgcgaaacgggaattgcttgccctggaagcgcaggtgagcggaagtgtgctggccttgtgacccgtgatgtgaggaagacaggcaaggctgttttgggaggctgctcttccggggcagcctggcaggggggggcgttaagaagcttccgcgtttgcgccggaatttccggctgtcttcgtttaaatggaggtgccttgtgaggcgcttcaccatttgaggagggtattccctccctgggcgaatccggagagcagggtgcccattgctgaggttttctgggctcttgcattggcgcggcccgtgtattgctccatgttggcgcggttgtacagggattgggcgttcctcatggcttccgccgcttcatcctgaatccgggtttgcaggcgtgtcgccagagcctgttccctgatgggaacggagccttcccgaagcagggaagattgggcggcgtccagtcgggcttctcccatttggcgcgcagcgtcctgctgcatgcgtttggcattttccatccctgtctgtttttggaggtccgcttcgttcctgagggtggcggcatttgcgtccgccgcctgtctggtggcttccgcgctttttttctgtgcagacgcggatgccgcacctgctgccgctgaagtagcggccagtgttatcattcccaatgatgctggatcaaatcccatgcgcgcattctgatatgaaaaacggttcaggcgcaaaacgcctgaaccgtttgacatgaatcagggtttggcacagaagaggggttactcaatcacgatgctttcaatgttcagcaccggacgttccggagtggaatggggatcaatggttccggtaatgatgacggcgtcttgttctttcagcccgttcacgcctttggcggagtgcttgatgggctgcccctgttcatccacgaactggacggtcatcgtattgtttttccgtatttccaccggtaccgtaccggcggcccagactcccttctccttcatattgaccaggagctgagctgggtctccgatggtgaaggaagcaatgttttttgaaaagacggggtcatctccgatcaccgctcccttgacggtgactttgtcgcccggagccgcttttctggcatctgaaacgaccagagcgcgtggcaggccaaccatattttccgcgaatctcacggccatcttctgggtaacgttctggtcggaggtgagggcgtttaccgcttccttgggattgcagcccatcagggaaactgcggccattgtcagaatgatcaagtgtgtggtgcgcatggaaactcctttctgttgaaaggttggattccttttctccttctgccgttcatcattccgtgtaaggaaaagaatattttttacaggaacagcccggcagccagcatggcgaggtccctgagaacgtcccacaatttttccgcattgtggatgcaatccgccagaaagcggtgaaggcttacggcattgaacaggcgcaggagcgccaggaagagaagaagattggcaaaatatacgagaatcagggagaagaaggtgccgttgtccgctaggtccggctggtccttgggaatgatccatgccgtccagaacaggtggaagcaccaccagaagcccaggccggagtaaagaatggcctggcaggtgactgtaggccagaagaggtacgttacgccccataccaatccccacagcatggcccagagaggaaggaagtagggggaaagggagataaagatgttgtttttatccgtctggatgtaccctccgtccagatccgctttgaaagcatggatggagccgtggctgcaaatgaccgccagagcgtgcgtcagttcatgccccaatacgtacaggtacagcagggaggatgtgaacagcctgctgctgcccagcaccacccacacggcagcgcccatcagggcgtaccatacgggaatggagaagaggatattgaggctgccggaggcatgggtcagctggtcgcacagggacatggccgtgatcagggccagcggaagcaggataagggtggctacggcatgcctgatgaaccgggttctgcgcgggagatccatgaaggaaaattcctggcattcgtcctcccagtattcggaggatacctgggcgcggtaagttttgtcccaggcgtcccggttgcatcgccgcatcatgtcgccgaggcttgccgcggatcttggtttccgggcggtttctgcataccggcgccagtcctggcgcggcggtgtgtgtctgggggccttgggcatgcggtgtgaggtctggaaccagcataaagggacttgaggagaaatgcgaaccaaatttgcctcttccggaaaccggaggaaaaaatgttttatccacgccggctgttcctgtataatccgccgcatgcaagatgtcctgctggttctggaaacttcctgtgtgcagtcttccgttgcggcttggagcggggaaagtctgctgtgccaggcggcatggagagcggagcgcaaccattcctccgctattttcaaggcggtgcggcaggttctggatgctttggaagggcggcgtttgaaggaaatcgtggtaggttccggtccgggcgcttacggcggaatccgcgtagcgctggccgtggcggacggactttccctggtgcacggttcccgcgtggcggctttttcctcctggaacggacttggtctgcatcatggtgaggcctgcgtaatgtcagatgcccggcgtggcggctggacgtgggggaggctggaaaacggcgttctgacggatgtgccggcagtgcttcctgcggagcaggcccgcgccagcgtggcggagtgcatgggaaaaggcgtgcccgttttttccacggaaacggcggatcatctggccgcccgggaaatgtcggggattgtccccgtgtatccttctgcagaggcgctcggggccgtgtggctgtccctggcggaggcccgcagagaagaacttctggaaagtccggcggaaccgctgtatgtgagggctccgcacatcacccgcgccaaacgtcccgcatgggccgtgaaggcgtaattaaggtttgactttttggaagattgttagacttttaaccggtaatattcaccaccagtagcattttttaacatgagcaatgacactttttccgagcgcctcgcatatcccaaaggtttaaaaggaatcattgccaatgaatccgctttgagtgacgtgcgcggcgaggaagggcgtctgttgtatctgggctacgatatcgatgatctggtggagatgtgctgttttgaagaagtggtttatctgcttctcaacaagcgtcttcccaaccgtgaggaattggagggcatcaagaaacgcctccgttccgaccgcgacctgccccagcccattctggatttcttcaaaacggccaccaagtccgcccggcccatgtccgccctccggacggctgtttccatgctcggcatgtatgacgaccggacgaaggatgccgggcagttgaaggaaataggcctcagcctcatagccaaggttcccgtgatggtggcgtattactaccgtttgtgccagggtctggagcttccccccgttcgggaggacctgagcgaggcggaacatttcctgtggttgctgaagggtgaggaaccggatcagtatgaagcccatattctggaggtagcctacattctgcacgcagaccacggcatgaatgcctccacctttgcggcgcgcgtctgcatcgccacgctttcggacatgtattccgccatcaccgcggccatcggcacgctgaaggggccgcttcatgggggcgccaatgagggcgtgattgaaatgctcaaggaaataggcacggaggaccgggtggactcctacattgaggacaagctggcgcggaaggaaaaaatcatgggcatgggccaccgcgtgtaccgcgtgctggatccccgcgccccgcatttgcgacgcatggccatccgcctttcctcccgaatcggggaacccaagtggatccgcatgtcggaacgcatcgcgaaacttgtccgggagcgcaagggcttgaacgccaatgtggatttttattccgccacggtttattacagcatcgggatccccaccaggctgtttaccgccattttctccattgcccgctgtagcggctgggtggcccaggttctggaacaaatggaggataatacgctgtacaggccgttgactctttacacaggacccaaggaccgcattccggttcctacgatcgacatgcggtgacaggttttaatcaggaaaggcgccggaatattactccggcgcctttcctgcatctgccttccgcttttctttttcgtgaaaatatcctttctatccgccggcggtattcaaccgtactgttcattgtcctgggctttttccattatagccgtagcggaagctcaagaaattattgaatagcaatatgccgttatcgcgggtggggatgaagcagatgattttttcagttccctgggagactatacgggattcccataagggtatgttctgggatatctgcggagccgtctcttccttgattctcttttatctggatatgtccctgacagaggaaagacgcggaacccgcctcttcatggccctgtgttctttggtggtggaacccgctgtaagaacatccatgccgatgtggagaggcaggcggggggctcgtcaaatgccggtctggcgcagtccttcataaaggacgacagctacggctgtggatagattcaggctgcgggctccttctccgggcatcggaatagtcagggcggtatctgcgtgttctctcagcatgctttccggcaatccgcgggattccggtccaaaaaccagatagtcccctgcgtggaaaaccgcatcccaatgggaacgtggcgccttggtgctcaggtaccagaactgcgcgccgggggctgccgcctgcttcaattcctccaggctgtcccagacatgcaggtccaccttggcccaatagtccagacccgtacggcgcacatgcttttcatccagactgaaccccaaaggtttgatcaaatggagcctggagcccgttgccagcgccaaccgtccggcagctcctgtattatgcggaatttccggatggaacatgacgatgtggaaacggggctgcatgcgcttattctcatcacaaacaggcctcccgttcaagtgggacttgtccaaaagtggcaaataatgtacgttttcacccgatgagagacatcgtatattttgatttggaaacccgtcattccgcggcggaggtgggcggctggcataatacggccgagatgcgcctttccgtgggcgtgacttattccacggcttccggcaaatatacgatttattctgaggaaatggtggatgatctcatccggcagctttcccaggccgacctggtggtgggttacaaccacgagcatttcgactatggcgtgctccagcgttatacgatgtggaatatgattgatatcacgaacaaccttgatttgtgcaaggacatcgaacagcgtgggggagtgcgcgtcaagctggattccgtggcggccgcctccatcggttcttcaaaaacggccgtgggcacccaggctctcaaatggtgggcggaatatgcgcagacgggtaatacggagcttttaatggatatagcccgttattgctgttttgacgtgaaggtgacgcgggatgtgcactggtacggggcggaacacggtttcatccgttatgatgataaaaagggcggccaggtggaattgcccgtggattggaaattgtaacttttcctgcatgcatgcccggccagctgtagccggttctttttccgggcgctgaagtgggtctggtttcccgcctttggcggcgttgccgtttatcccggacagatgccggttatcagggaatggctggggcggagaaaggcttccgggaggaagcggacggcaaccgcatggttgccgcctggcttaacggcggttgatgcgggccacttcccgctgggcttcgcgcatttccacgcgggctttcaaatcgtagcgctggtcgcggtgggttttgcccttgcccaggcctagagccagtttcaccttgccgtttttccaatacagcttgagagctaccagggagcagcctttctgggaggtctgctgttccagtttgaaaatttcccgtttatggagaagaaggcggcggggccggcgcgcctggtgctggaagaattctcccgctgtctcccagggctggatgtcgcagccgtacaggagcatctggccgttttccaccctggcgaaggaatcggcaatattcaccttgccggcgcggatggatttgacttccgttcccttgagttccatgccgcattcgtaggtgtccagaatttcgtaatcccggcgggcttttttgttggtggagatgtcggagctcatggcacgaagggtagaaggatgaaaaggccccgggctgggagaccggggcttggccggatagcgaggattccgtacggaattccggtccggaacggcaataaagggaatgtattattactggttgtcttcctggaggctgccggattccgtatgatagacgagcttgccttcaatgatttccgtcagggcaatgttcgcgttgcccatatggggcgtggtaggcaccagcggggcgcggccattattaagctgggctacgcggcgggaaaccacgttgatcagcatttggggctcgggaatgattttggaggcttgttcgacgagttcggctttcatgtaaaaaggtctaggtagatatcctgatgcgaagagagatataaaaacggttcctgctcggaatcaagcctatattacggcatgagctgccttcgctcgcgggaatccagttctttccatgcgccgggtttcagtcccgccagggagaaatttccgattctggcacgaagaagccggagcgtgggaaagccgatggcggcggtcatgcgccgcacctggcggtttttcccttccaccagcgtcaattccagccatgaggtgggaatggaggcgcggtagcggacgggagggatgcggggcggcacgtcaggctccctgcgcatgaggcgtgcccggcaaggcagcgtgcagtacccgcggatgcggaggcccccgagttccagagggcgaaggtccgtttcggaaggagtgccttccacctggctccaataggttctgggatgcctgccggaggggttcaggagacggtccgccaggcccttctcatcggataaaagaagcagcccttccgaatccgcatccagccttcctacaggatacacgccgggaggaaaaccgaattcagccagtgtccggtggtggggagcctccttcgtaaattgggagagaatgccgtaaggtttattgaacgccagaatcatgccgtgcacggcaagggtagcatgaaccgccggctttggcacgggaaattgaagcggcttgacttgtctgcgttgggaaaggaaagtatctgcatgcatggaaaaacggcaggttgcgtcctgatgcttgcgtgttgcgtgcccgtctgggttcaggcggcgccggatgcgggggaagtgaaggcaaaaattgcgcggaaaatctggcaaaacgaatgtgccgggacaataagggggctggtttcctggaaccggggagaagcgtttccttccctgggcatcggacatttcatctggtttcctgccggagtcacggaaaggtttgaggaaagtttccctgctttcattcagttctgccgcaggaggggaatccgggttccggaatggttttccggtgcggctccgtggcggaccagaaaggaatttgaagcggcggacgttcgcggcggtcttcctgaacggatgcgccggtggttgtccagtccggcggccctgcaaatgcaggcggatttcattattgccaggtctgtggccgctctggagcgtatcaagggccagtcccgccgcccggaagagatggcggcccgctattacgccgtggcgtcggttcccaacggcatgtatgccctgattgactacgtgaatttcaagggagaaggaaccaatccggcggaacattaccgggggataggctgggggctcaggcaggtgctggaggaaatgcgctccgtttctcccggacagcctgcggcggttgaatttgcggaagcggccaaaagggtgcttcagcgccgcgtggacaacagtccgccgggccgcggagaagcgcgctggcttgccggatggcggaaccggtgcgattcctataagaggaatttgtgacgaagtcctttcccaacagaaaagaccagttgtgcaattatccttgacctgacggggattagggtgtaattccctcactccatcctgaaacttcgctgattttatgccaaacactcaagaagaaacaacgctgattttgctgaagcccgactgtgtgcgaaaaaacctttccggcaccattttgaaacgttttttgtccgaagggtttcgcctgcgcggcataaagatgatccagcttgatgaaccggtgctccgggaacattacgcccatattctggacctggtcatcaatggggaaccgcttttcccgaagctgcttgatttcatgaccagttctccggtcattgccattgccctgaaagggcccggcgttattgtgcgcgtgcgcgaactgctggggcccaccaattcccagaaggcagagaaaggcacaatccgcggtgatttcggaacagacagcatgatgaacatctgccatgcgtccgacagccgtgaatccgccgccgtggagctggcaagatttttccgggaagaagaactgtttgacggccttaattaagggaaggccgcctttttcccatcaggttaattgagggccgcagctgtaataacggctgtggcccttgccgttgcgaggctgtacctcccatgggaggatgaagggggggaggcagcggcttttccgggagaagcaggaaagaacgggttacttttcccagggagtggtaagataaaggaaggcctttttcatacggtaggcctcacgcatgaagccgtccatgatattgttgcagctgtgtttggaaaaggaatggccgtaaatgcgcttgatggcggcatcctctccgtgctgcttctggcgctttaactcagcgtccatgtcccggcgttcgatattgggggcgctcagattgtcaccatgccagcgaaaatccgccagcagcctgttgtaattcacgaacttcttccccgcccggcccaggcgcgcgtaatattccccgtccatgtcgtagtggaaacgttcgtccagcaggaatccctcttcaatagtagtgcttcggcgcaggaacaatgcggtggaagccagataggtgccgtaccagatgtgcatgttcagactgtagggcagggccttcatggcgcgttggatctctccatccggcccgatgaaatcccatgctccatacacaatgtccgcatccgggcgggaatccgcaaaggccttgaccgccgccagagcccccggcaacagccggtcgtccgtattcagccacataacccatttcccgcgcgccttgcggaagccgcggttaatgccttccgacatgccggaatccttctccacatgcagtttcaggtgagggtaggagtgcaggatatccagggtgccgtccgtggacccagcgtcctggataatgtgttcaaatgtaaccccttcctggtttttgacgctctctatgcattcttttacgtagcgggcgtaattatagctgggcgtaataatgctgaaatccggttctgtgtccataggcaaggttagttgaaaggcttgatggaacgttccctggcgatgtaaatagggcgctttttaacttccgtataggttttggccagatattggcccagaatgcccaggcacagcagcacgatgccgcccatcatgcagaagacgcataccagggaagtccatccgtaagcggaatggggccagatcaattcgcggaccgtcaagataatgatggaaaggaatgagatgaaggaaagaagtacccccatgatggaggccagcgccaggggggcggtggaaaaggccacgataccttcaatggagtacaggaacagcttgaagaaagaccacttggtttctcctgccacccgttccacattttcatattcaaaccatttggtccggaaccccacccattcgtacagccccttggaaaatcggttgtactccttcagggaaagcagggcttccagtacgggacgggtcatcagcttgtagtcccgggctccgtccacgatgcgggtgtccgatatttgatgaatcgtcttataaaaggcgcgggcgaaaaaggaccgcagcagcggttccccctgccgggtgacgcggcgcgtccccgcacagtcatatccttccttctcaatggctttcagcatatccgggagcagggaaggaggatcctgaaggtccacatccatgacggcaacataatcccctgtggccgcttccaggcccgcatagatggcggcttccttcccgaaattgcgggagaaggaaatgaattttacttcaggggagtgttccgccattttcttaatcatttccagggagcggtccgtggaaccgtcgtccacgaagataagttccggggcgtagccctccaggcattccttgaagacccggtctatttcttgcttaaacgccggaatggcttcttcttcattcaggcagggaacgatcagggaaatgcgtttcatgtcagtgcccgaatcatacttcagaagccgtgcggatgccagaaaatagtccctccatgcacaaagccttcctccactggaaggggaggaaggctgccggaaaagaagccgtgcgcggaaaaataccggtaaggtcagaacttcggcaggttgccgatgtcatcttcgttttcaggggcgtgcggatctttcaaatcactgtccccgtcttttccgaaagaccagaaatcataatccggattcaggccgttgcccattttcaggtttttggccctgtcggttctggtggggatggactgctcgctgcccaggcggtagcggtagggggaaccccatggatccgcaagaatataaagggtaaccggcctgccgtccttgcttttcacatggacttcccggacagtcgggttgcttttgggctgcgtagaggggttcaactcatcattgtaaatggttgtatccctggaaggaataccctcattcttatggtcgccgaacagagccatgtaaaccacgttggaactgtattcctccccgttggccacggctacgccgtgattattgaagggagcttccgtgccgtaggggtagcggtcatggtcgctgtggtagctctccaaccccatttcaattttgcggacaatggattccgtagcctgttcgttctttctggtttcaagccaggtgtaaatggagatggtcagcgtggccagcaccacgatgatcaccatcactaccaggatttccatgagggtgaacccctttgtttcccggagccgacggtatgcggaatgatttttcatctgattctgcttgaggggttaccccatcttttcaataacctgcaggaggggcaggaacatggcgaacacgatgccgcccacgaccacggccaggaatacgatcatgatgggttccagcatggaggtcatagctcccacggcattgtccacttcatcatcatacacgtccgcgattttcaggagcatgtccggcagctggccggtttcttcccccacgtccaccatggagattaccatgggcgggaaaagcttggaggaggacatgggcgtaactacggattcgccctccttgacggagtcatggatgaggccgatggcgtctcccacgatcatgttgccggcggtatccttcgtgatggtaagcgcctggaggatgggaacgccggaagtcaccagcgtgccgaaggttcgggcgaagcgggcgatggcgcttttgctctgcacattgccgatgaccggcatggtcagcagagcggagtcaatcttgcggcgtccgttgggcgtcttgctcatggccgtgaaaacagcgtacaggatggcgaccacagcggccagaatgacggcattgggcacaaagaagggggcggccatgaaccagtcgctgatgccgaacacaaactcggaaataccgggaagttcctgattctgctctgcgaacatcgccttgaatttgggcacgatgaccagcatcaggaagatcacgatgcctacggcgataaacaggacgatggagggatacaccatggcggagatcaccttgcttttcagcttttgagccttttcctggtattccgccagacggttcagcacgacttccagcacaccgcccagttccccggcctttaccatgttgacaaacaggcggtcaaagattctggggtgttgggccagggcttccgagaaggtggagccgccctgaacggaatctcccagagcttcgatagttacgcgcaggttggggtttgcctcctgtttggccagcacgttcaaactctggagcaggggaagccctgcgtcaatcagagtagcaagctggcgggtgaaaatcatcagagccttggccttgattttgcctcccagtttgcctttttgcttcttagcccccttggcctttttcttggcggcaggcgtctgttgaatcttgcccttgcccgcttctacgatctgggtggggtacaggccatgcgcccggatggcttccatggcctccgcttcggagttggcctccagggagcctgttttctggtcgcctttatggtcaagtgctgtgtattgatatttaggcatatatgttgtattttaagtgttttttcttggtggttgaaataagtggggaagcaacggcgtccggctgtccgttaagtatatttcagcacttcttcaatagtagtgttgccgtcataaatatttctcagcccgtcttctctcagcgtggacatgcccatttcaatagccttctgtttcagcaccacggagggagcgcgatccgtaatcatgtcacgcagggtgtcgttaatatccagaagctcataaatccccttgcggcccctgtagccggaattggagcatttatcacagccgcggcccgtgaaaaagtgcttgtcccccaattcatagggagatacgccaagctgggagaggatggtggatgagggttcatacggggtgcggcagtccggacagatggtgcgcaccaggcgctgtgcaagaaccccttccagggaggccgctaccaggaaaggttcgcaccccatgtccaccagtcgcgtaatggctccggcggagtcgttcgtgtgcagggtggagagaaccaggtggcccgtcagggatgcctggatggcgatctgtgctgttgccatgtctcgcatttcccctaccagaatacggtccgggtcctgccgcaggaaggcgcggagaaccattgggaaatccaggccgatggcttcattgataggaatctggatgatgccgtcaatatcgtattcaacagggtcttccgccgtcagcaccttggaatcaatggtattgatttcacgcagggcggcatacagcgtagttgtcttgccggcgccggtggggccggtaacgatgaaaatgccgttgggcttgtggaccgtatccagaatatattcgtggatatgcgcgggaagccccaggttgtccatgttcaagttgacggaagagcggtccagaacgcggagcaccacggattctccgtactgagtgggaagggaggaaacgcgcatgtccacggaacggtttcctatctgcttgacgatgcggccgtcctgcggaatgcggcgttccgcgatgttcatgtttgccatgaccttgacgcgggaaatgaccggcacggacaggtggacggggggaggctgcatttcatacagggcgccgtccacacggtagcggattttgaattccttctcaaaaggttcgaagtgaatgtcggaggccttttccttgatggcctgtgtaatgacgaggtccacaaagcggatgacgggggcggcggcggaatcctccgtctcattgttgacctgcatgttgttcagttcctgcatcaggtcggacatggcggcggattcgcctccataaagctcattgatgcgttcggaaatctggtaatccggcgctaccagaacatggatgtcctggccgagggcgaagcgcaggtcttccaccgtctgaggattcaggggatccaccaggcagacgtacaggccttccggaccgtgccgcacagggagcgccccgtgcaggcgcacgagcgtggccggcatcatgttctgcacgttcggatccggctggaagttgtccagtgtaatgaattccgtacccaggtcgctggcgatcatctgccagatatcatccttgctgccgatgatgccgaagtctgcaagcacttccggcagttccttgccggaggcgatcatttcctccttgatgtcctttgccagggatttgtcaatcattccccggccgatgaaaagttccagtgtgaggttggtgtccataataagcagaatgaatagcggggaaacatcagttggcgtctcccatggtgacgttcagcacttcttccggagaagtaagcccggccagcactttgcgtacgccgtcttccctcaaggttctcatgcccagttcccgggcgcgctggcgcagctggggggaagtcaggttttcgttaatcatgcggcgcacctcgtcgtcgatttcgaaaatctcaaacagccccattcggcccttgaatccgccgccgcggcaaaagtcgcagccgtggggtgccttgatttggccctgggcaaggcgggacatgtcaatgttcagcgtatgcgcctgcttttccgtcagagtgccgtccaccttgcagcggtcgcacagcttgcggacaagacgctgggccatgatggcgcggacggaggaggcgatcaggaagcgtttgatgccgatgtccgccagacgggccacggcgctgggagcgtcattggtgtgaagggtggagaatacgaggtgccccgtcagggaggcgttgatggcgatgctggctgtttccatgtctcgaatttccccgatcatgatgatgttgggagcctggcggagcatggcgcgcagggcggcggcgaaggtcatgccgatatccgcctttaccatgacctggttgatgccggagagttcgtattccacagggtcttccaccgtgatgatttttttatccgggcggttgatgtggttcaggcacgcgtaaagggtcgtggttttaccggaaccggtaggacccgtcaccaggataatgccgtccggcagcgtgatgaggcggtcgaacacagcttcatcatccgagaaaaatccgagctggggaaggcccagcaccagggcggatttgtccaggatacgcatgacgatgctttccccgtggttgctggggacggatgaaacacggaggtcgatttgcttgccgccgatgctcatctggattcgcccgtcctggggcatgcgtttttccgcaatgctcatggtggtgctcattaccttgaggcgagcgatgatggggctgagcagtttttttggatgggtggccacctccaccagcttgccgtccacgcggtagcggatgcggagcctgttttccatgggctcaatgtggatgtcggaagccctcattttgaaagcgtccgtcagcatctgctgcaccagacggataatgggagcatcctccccttccagcccgtcggtttcttccggaacgctcagatcccggtaaaattcattcaaccggctttccaccgtgctgcgggtggcgacgctgaaaatcacgtcccgccccatcagctggggcaggctgtccatggtttccagattcagggggtcgtcaatggcaatgttgatggaaaaaccgtcgtcggaaatggggatggcccggaagcgcctggcaagttccggtgtaatgagttcgcgcacctcctgggggatgtgcatggagcccaggtccacgacggggagcagggagtttgacgccgccacctgagcgatgacgtcttccgtaagataattggcctgaatcagaaaatcgaccaggtcctgggtgggagatttttgactgcgcgcgtactgaagaatttcttcattcagatatccggcctgcgtaagaagttcgatgagatatgattcgttggagtacacgtcgatctctggatgctattgttggaagtctgccgaaatggagcggcaggatactcccctatttctgacaggttcggaacgtaaagtcaacttagcttccctcaaaatggcattttttttcgggcgtgtccggaggcgggaagaacctcctcctctttccgccgctttccaaacctgcgaaatctcccggaaagcgggatttttcctgttctcagggcttttggcgggggagcttggaaagcaggtcttccagctccggcatgctggatacgcgcaccaggcgggaacgcatttccttggcgccgggaaatcccttcgtataaaccaggattcgtgacctcatatggcgcatcgtgtgaagttcatccccataatggcgggactccagggccatccgggcatgccgcaaaatcagggccgccttttcctgcgggtctctggccggcggcatggctccgtgcagcagataatacttggcgtctccgaaaatccatgggttttccatggccgcacggccaatcatgacgccgctgacggccgtattttcttttacataagctacggcctgcggggtggaaatatccccgttcccgatgaccggcacggacatggcccgcgcgcattcgtcaataatgtcccagttggccgttccggaatactgctgggagcgggtgcgcccgtgaatggtgatcatggaaattccctcattctccagcaggcggcacgcgtccatggcgcacaggctctgaaaatcccagccaatacgtattttggccgtgacggggattctctctcctacggctttcacgacgcctccggcaacggaagccagcaggggaagatctttcaggagggaggaacctccatttttgccaaccaccttgggaaccgggcagccgaagttgatatcgataaaatccggcttctcatggtccaggataattctggccgcctctcccatgtggttcccatccgctccgaagagctggatgcctatggggcggtgggcattttctatctttgtgtacctgcggtttctctcccatgcctggagaattccttccgcagagacgaattccgttaccattacatccactccaagctccttgcagatagtgcggaaaatggggtccgtcactccagccattggagccaggaacagcgggaaatccgttttgaagaacgggaggggagcgggacggttggaaaaagtcatgattccttaggatgaggctagcacgggttcccgtcccattcaagcatcttgcctgttctggcgaagaagggaaggtgcaagatgccggtgctgtgcaaacatcggagcgtcgaaaaatatggcgctcaataaagaggtgcagtagtccgcccggttttccggaggaaattgcaggcgcgctggacagtatcgtttgttttcggaaagaaaaaacggcttcactttttgagtgaagccgtttggcaaaagttgaaagattgtcttaatggttgccgcagccgcaaccgccgtccttatggtcgtggtcgcacttgccgtcgcaatcgcaattttccttgtcgcactggccgccgcaggagcaggaggactgggcgctcatggcgcgctggcgggcttcctctatttcttcaggagtgggagcgcggccaaggtcaatggacatgcccagataatgattgatggtgttcaggagttcgtcaatggtctggcgcgcttccaaaaagccgcgggccgcatcattcttgatgacgttttcacgcagggcgtcgaatttggaaatttcctcttcggtaggaggcattccggccaggtgcttgttgcgcagttcttctccgtaagcgtttacttcttcaaaaagcttggttgcttccggattttggaaaaagagacctatttttgccttggaggccacaaccttgtcttccttggcgagcagattgcaaagggcttccgtggcggagcgcaggttgtcgttgagaacgggggtattcatatgagatttatttaatcatgccttttcgtgcagggcaatccggttgcgaggcatggcacgcatttccttgccgcagggttgctgtaggcgggaaatccggaagtaaaaaggcgttccgcttgacgtggaacgcctttttatggtgatcaacgttttttaatgcgccttgcagaattcttcaaagcggtccagagcttccttcagaatgtccagcgtggtgcagtagctgatgcggatggccttgtcattgccgaaggcgatgccggggacggccgcgaccttgtagcgttccagaagcttgtcgcacagattcagggaggtgagtcccagcctgcttgtgtccacaaagaagtagaaagcgccctgcggctccacaacactgatattcgggatggcgctgaggcgggagtaaacgtactggcggcgcatgtcatattcgtcgcgcatgtcgctgatgaagctctggtctcccgtaagggcctcaatgcctccatactgggcgaacgtgcagacgttggaagtggtgtggtcctgaatcatctggatggccttggcaatggcagccggggctgcggaatagcccaggcgccatccggtcatggcgtaacccttggaaaagccgttgatggtgatggtcaggtcgtacagttccggactgagggaggcgatgctgacgtgcttggtgtccccgtatacgaggtgttcgtaaatttcatcagctaggatgaggatatcttcgctcagggccacttctcccagggcgcgcagttcttcttcggaataaacggacccggtcggattgttcggggtagtgaggatgaccatcttggtgcggggggtcatggcttcctcaaattgttcggcggtaagcttccatccgttttccgccgtggtttccacgatgacggggatgcctccgcacatgcggaccatttccggatagctgacccagtaaggtgcggggatgatgacttcatccccctcggatacggtcgccatgatggcgttgaaacaggcgtgcttggcgccggctcccacggtgatctgggtgaaatcgtattccaggttgttttccctcttgagcttttctgcgatggcctggcggagtgcgggaagaccggcggaaggcgtatatttggtggctccgttgttcagggccgcgatggctgcctgcttgatgttttccggggtgtccatttcaggttcaccgcctgccaaaccgtaaacttcttcaccggaagctttcatagccttggcccggttggtcaccttgagggtcagggaaggggtcaatgccgcaatgctgggggaaatcatgtccattgttgtggtgcagtcgtagattttgatgccttggcggaaaacaggctgttctccgcataggcggaaaaactttactcattgagcgcacccctggcaaggagaatgcttgcggcggccattctttttcttgcggagggcgttcctccctctatggaagggatttttcccgtcagcgtttcaggaatttggcgcgcaccgcttccagctccggcgtcttcagcaggaaagccgccgccaggtagacgatgccggcgcaaccgcagaccagggatatccccagcaccctggccgggaaggtccagttcaggaagccctggaggaaccatgccttgcctgcccagcacacggcccccagcaatattcccgccgccatgatcttgaccagtccggaaagcagcgtccgtccgtctacgccgcccagctggcgtcgcaggtaaaagaagtaaaagagaaaattgaaggtagtgaccacggaggtggtcagtgccagccacgccgcgtttttatgcaggatgtagacgaaacagtagttgaggccgatgctgatagccagagccacggcggcggcaatcaggggaacccagcgtttttcaagagccaggaagacgggctgcaccaccttggtcccggcatagcccagcaggcccagggaataggctcccagcacttcccccgtataacgcacggcctcctggttgaagcggccccactggtatacggcggagacgaattccgttcccaggatggagaggatgagaaaagcgggtaccgcaaagaatgccaccagccgcaaccccttggcgatgtggaccgccacctcttttctgccgtctcccaccatcatgcgggaaacagcgggcagcaccaccatgcccgtcgcgactccgaagagccccacgggaagctgccagaggcggaacgccgtggtcagggcggtgacggagcctttttggagatccagagcgaaccccgtattgatgaagatggtgaactgcgtcacgcctgaagccagcacggagggaagcatcagcccccagattttgcgcacgcggggatcgtcccattggaaattgggtttccagcggaagccggttttgctgagtttggggagctgcacggcaatctgggccatgcccccgatggtgacgccgcaggcaaaaccgtacaaagctttggggccgaaggatggatcaatgaaatatccaatcagcaggccaagcaggatggaagtaacattgaaagcggcggaggccagcatgggcaatccgaaaacccccaccatgttcagtgcccccatgatgagggcggacagggaggcgaatccgatgaaaggccacatgatgcggctcaggtccgtggcgaacaattgctccgtcagagagtgatctccgctgtagagggcttccatgacgggccctgcaaatagaatccccagcgttacaatggcgatcatcagggaggaaagctgggtagctaccttgttggtcagttcccacgcggccgcttctccctgcgcttcccgcgttttggaggctacgctggtataggattgggaaagagccccttcagcaaacagatctcttaacaggttggggatacggaaagccgtgtaaaaggcgtccagggctcccgtagccccgaacagggaggtgtacacaatttccctggccatgcctgtcaggcggcaggcgaagatggcgccggaggcaaccaggctgttccgcatcagggacatgaaaggggggaatttacttgaacagctggcggcaatacggctccacccgtttcattgccggattgtccttgacagcctggtcgcgatcatcccggcaggggaaaaggtacagggcgtatcccccgtagccgcctcccagatatttttttgcaagggcattgggaatatccggcagggggcgcattccttcgtcaagctgcacactgtaatacagggctacgcctgccgccagtgtattgatgttgcgttccagaactccggtgcgggcaatgagggaggattgggagatgcgtacgtagtcccgttgttcatccgccatctttggggtatcgtgttcttcacccgtatatagaatggccattcttccttccaggaagtcacccgtgcctttgacatccagcaccggagaactgccggagcgccatacgcacaaccccgtttccgcaatgacggcaggatcctgccaaccgacgcccagagcgagttcggacgcgaccggatcgcgcccttccagcatggcccacgcgccgctgcctcccagcccggagcgtttttcatacggccattcgcagagggaaaccatgggggtgatggcgcagttgaccacataggagccttttctggcgtagcggggcacgtccagccatcccccggcaaagtccacgcgaagcggtacggcggacggagccttgatgcggttcaccagcatggtggtggagacgggagtgaatttggggggcgtcttggggagcaccacgtaattggctccgacgcgggcgcacagctccttcttgatatcgctgtaaaggtcatcttccgtcacagccaggatatccggtttttcctgaagaaactcttcttcaaaatccaggccctttttcatgccggtacccaggataaccttgtcaaccatgcgcaggctttccagcagaacttttttgtgttcgtccggaatggacggcttgcgctgcttgtggtgccacagcacgggttccgaagcgaaagagacgattagatagtcgcccagagcgcgggcttcttcaaagaactggatatggccggcgtggacgatatcatagcagccggagacgaaaacttttttcatgcgtgtaatgatagataattagtctgcaacagtatgccctattgccgtgccggatgcaagagcgagatgaaaatgcgttaaaaaacggcgcggactacagaaagcccgtgccgtttggggataggaaaaatcaacttctgcaaaaacggtcaggaagccatagcctcctggtagcggcgttccacatcgtcccagttgatcaggcggcagaagtcttcaatatagtccgcccggaggttctggtgcttcagataataggcgtgttcccaaacgtcacagacgagaatggggacaaggccgggaatttccagattctgatgtttttccgccccgcagattaccagcgtcttgctgatggggtccactcccagaataccccagccggaaccttccactccttgggaagccgccttgaattccttcatcatggcttccagagaaccaattttttccttgatggcatctaccagaggaccttgcggctcttttttgggatcaggcgtcatgttggtccagtaaatggtatggagaacatggccggaagcattgaaggacaaattacgcacccagttggtggtggcggaagcgtccagtttcccgtccgcaatttcacggagcttttcagccgcggcattggcgccggcgacataggccgcatgatgcttgtcgtggtggatgcgcacggtcttttcatccagcatgggttcaagcgcgtcgtaggcgtacggaaggggtggcagtacatatttgccgtcggcatagccgatcgtggagggatcttgctgtttagtcatcttgtgctgtggttgtatggatggccctgttgcccgggcctggctgattgttcccagcgccgccaatgaggaaagagcaataaaacgccttctgttcatgtccgcgccatgggaatgcataggtgtttggacatgggttgttttggagttgttcaaaaaacaggaacctcggggttctatttttcttcttgtagaggcagctgggaaaaagcttttctaccttctggcggctgctgccgggccctgggctccataggcgctgacgcccctgacggcgacagatcctgcatcccccaggaaggatttgggcagggttacgcgggtctggctgcccggcagaaggatgcgcgtagcccactggctgccgtagcgcgcctggacggcccatttccgggagggattgccggacggctgccaggagagggttacggtggaaccattgtccgccacataaaaattctgcggttgtccgggtgtgccggttccgcaccagggcatggcgggcggaacggccatggaggggtacaatctgttcaggtatttctggatgcctccggcattccgcatgatggatttgatgctccagaagcattgtccgggggcggttctggcaaggctgcgggagtagttgacctgcgccgctatttcagaggcggggcggcccgggtcttcgctgctcatgatacgtgccgtggcaatgccgggccacaccgggcgtctggagttctgggcggcccaccattgcatcaatgcgggaaagctctgcttggccgggctgcagcgccagtaaagctggggggccaggtaatccacccatccgcgggaaagccacttgcgggcgtcgcacgccagatgctcgtaggcgtccactcccgcttcaatgccgccgggaacgcccggcctccagatgccgaacgggctgatgcccacccgcacccagggtttggaagatttgacggatttgtacatgtcttgcacgaagtcgtcaatgtagccccggcgctgggagggggatttcccgtctccaaagctggcgggagaccaggtgcggccgggagtgggataggggtagaaatagtcgtccaggtgcaccccgtcaatgtcgtagcggcgcacgacgtccatgataaccttcagcgcgtggtcgcgggaggcggaggcgctggggttcatcagcagcacggagccgtttcgcttcatcaaatcagggcgtgtgagggaaatatggttgcggcctacggcatgcttgacgttggcctttgcccggaatgggttgaaccaggcgtgcagttcaatgccgcggcggtgagcctcctgaatggcgaaagccagaggatcatacccaggattgacgcccgggccggaaagccattggctccacggctccagagaagagcggtacagggcgtcggcattcgggcgcacttggagaaacacggcgttcagcttcaactgggcgcaggtattcaggatgttcagcagctccgcgcgctgggctgctccggagaggccggaacgggagggccagtcaatattatgaacggtggatatccatgccgcgcggaattcctgggggacagcgggaacggattctccggagatctgccacccaagagactgggaagccagggccagcagggagcaggagaaggcatggaacaggggaagtctggtcatgacgggaatggagaaggatgtttccggaacatttaacgcctattcggcggatctgtccatgacggatgccgaaggttccgtcatggacaggcggccttcagctgggccgggatgctaggctgttgatcaggtgggcgttgaatccggccccgaagccgttgtctatgttgacgacggaaacaccgttggcgcaggaattcatcatggcgagcagggtggttaccccgcggaaattggccccatagcccacgctggtaggtacggctatcacaggggcctttaccaggcctgccagcacgctggggagagctccttccatgcccgccacggccaccagtgcagtagcttggcggatagagtccagatgggaaaccaggcggtgcaggccggccacgccgcagtcccggtaccggactacccggctgcccagaaattccgccgtcagggcggcctcctccgctacgtattggtccgaggtccccgcgctgacgatgccgacgaagcccgtcgttctcggaacgggattcggagcaatgcgcatgagatgggcttccgggtgcatgtccgccgtcggaaaggcgcggttcaggtaatccagagcttcctcgctcagacgcgtagccagaacattttgtccggcggcaagcaggctgcgggctatctcttcaatctggcccggcgttttccccgcgccgtaaatgacttccgggcacccggtgcgttccaggcggctgtaatcaatgtccgtatgggaaggagcgggtacggtgccggctctgatttttcccgccgcttcctccgtggaaaggaggccttttttaaactgatgcagaatggaggtgatgtcgttcatgagggttcgttcatgttccctctggaatatccttccagatccagggtaatgtgccggaagcccagttcccgcagccggcgtgccgcggtggaggcaagctgtccgtcccagaacagcctgcgttccttttccggcaattcaatgcgggccaggctgtctccgtgaacacggacacggcaacctttcagccccagggttctcagaaaagattccgctgcgtccacgcgtctcagcagaacttccgttacggggcggttgtgttccaggcgggtcagcagacacgcataggccggtttgccgcagactgattccgggaggcccagccgaaaggccagccggcggatatccgccttgtccatggcagcttccagaaagggactcggaatgccgagctcctgcaaagctttgcggcctggtcggtaatcgtccaggtcgtcgagattggaaccgtccgccagcagggggaaccccatctcagccgctctggctgccagggaggaaaacagggcgtgcttgcacaggtagcagcgcaggggaggattattcgcaagggcgggcaggatgggaaacgccagtttttcctgccggacgcccaggcggcggcacaacgccgtgctgtcccgcacttcctcctccatcacatagggagttcgcgcggtcagggccaggcagtgatccgctcccaggatacggacggcggcggcaagcaacacgctgctgtccagccccccggacaaggcgacggcaaggcgttccctggggagaaggacggcgcgaagccgttcaaacggagtctgtggcgtcgttgtcatggggaggtatgggaaaaagccccatcagctggcattgtcccagcggcagcccggttttctccgccaggattctgcaatcttcaaattccgctttccggtaatggggacgaccgtgcatgaaagaagtttttacatgaaccgttccatggggagtgtggacgggggagctttcccggcgcagaatatggcggagcatgccatgctgcctgatgcccggcgtactgctgtgccggaagaaggcttcccgcacgcggtccgtctgttccggcaggcacagggcgcaaaccttgactgccagacggcctttcttcatgcagacggactcctgccaggtatccagagcgcctgcctccatcagcttttccgccaggtaggctgtctgttccggcgtcatatcgtctatattggcgcacagctccgtcagcagttccggggaagtttcctcttcttccgtttctaccagcatcacccgcagaatattcggtatgggaagtccctggcggtggccgatcccatagccggttgcggtaatacggcctgccagcggagaggggacgggctgcgccagggcggcaatgtaggcggctccggtgggtgtagtggcctcatgggtggttccattcaaggtggcccggaaatgtttcgccagcaaagccgttgccggcgcaggaacgggcattgttccgtgctggcaggttacggtaccggaccccagctccaccggtccggtgaagacggcgtccacccggagcatttccaggcagatggcggctcccgcgatatcgatgatggaatccaccgcgcccacctcatggaaatgtacttcttcaggagtagtgccgtgtacgcgggcttccgcctccgccagcagggtaaaaatagaaagggcagtccgcttgacggtattggaaagggcgcttgtctcaataagtgttcgtatatccgccatagtccggtgatggtgcgcatggctgctgccggaatgcccttcttcctccgtcagcacgtcaatccgtgttccccggatgccgtgctgctgcgcccggctgcattccagcttccactccccgtgcacatgcaatttggacagttcccgtttcaggttttcccggtccgctcccaaatcaatcagggcggccagattcatatctccgctgatgcccgcgctgcaatcatagaccaaggctctcatgatgacccagtgtagaaggaaaaactcctggctcaaggtcaaaatgagccctatcccgggaggggacccggtgcctggcggaccgggtttggcggattgccgtccggttatgagaaagatgccctgtgaaatacattgctagggaactttaaatatgccacaatccctgcgacgctgaccagcgccgcccccgttctatatcatgtccattccgttcttttcgaaattacgatcccagaagcattatcttcaactggttaagccggaattgaagcaggtttccgagtttgttgaagcgcaatcatcatgttttgacccggaagtggccgattacatggaaacggtatgccagtccaagggtaaaatgctccgtccggccctggttctgctggttgccggtgctacgggcggcatcaagcctgcccatatccgcttgggtgctttgctggaaatggtgcatctggcttcccttgtgcatgatgacgtgattgacgaggccgacaaacgccgggacgaggctacggcgaatgccctctggggcaacagcctcgccgtactgttgggggatgtcctcttttcccacgccatggtgctgggtacggaattcggcagcacggaattctgccgcaggctggcgaataccgtcaggaacgtatgccagggggaggtagcccagtccagccgcctgtatgatctgagcatgacccgcgaggaatattttgaaatcatccggaaaaaaaccgcttcccttttctccgcagctacggggggggctggctggatttccggagtaaccccggaagtggaggaatccctttaccagctgggggatctgctgggtgtggcttaccagatttacgacgactgcctggacatggtgggagatgaagacgatgccggaaagacgcttcatacggacgccaccaagggcaagctgacccttcccatcttcaatttgctggaatgcggtgacaggaatgtggaagctaccctgcgggacgccattgaaaaccgtgaagtggtggattactccgcctttcaggacaatcccgtttttgcagaggctctggacaaggcgattcaggtagctctggagaaaaacgaggcggcccgcgaaattctgtggctccttccccaaacggaatatcgtgaagctttggcggaaatgaccttttacatggacgagctgcttaacgactgccgtatctcctgacctgcttcaaggagtttttgtccggtcatgtccttatgtaatttgtgtcttccggcattttcccaaaaagaaacctgccggagggaatgggaggagcgcatgctggtacggtctgattgttttttcaaaacatggttaaacccggccacgcgcccgggaacggcagtgctttctttattccgtttttccgtacctgcgcgcccggaaggagtaggcgaccgccactacggcggcgagcacggcgtacaggatgaagcggtccgtggaaatggcgttggctgattctccgttggacaggaaaaaagtaattgcggccaccagcatgttgcctgcaaagatagtgaggttccagaaactggtgatgaggctttttaaatgcgccggggcttgcgtataggcgaattccaggccggtggtgctgaccaggatctcagagatggtgagtacgcagtaaggaatcagctgccatgcgatggacatggaggttccttcctccagccggtattgcaggaaagcgacaatcaggaatgtagcggagctgagggccaatcccgttccgaggcgcaccaggggccttgccagcgttgccaccctgggataaacaaatacggtgatgagggggatgaacaccatgacgaaaatgggattggccgcctggatttgggccggcccgatggaccaggaaccgcccgggagcgggatggaaagaggaatcatcctgctgccctgggatacccaggaagaagccgtctgttcgaaaatggaccagaatgggatgataaaggcgaagatggagaggattttcaggatgtgccgggtgtcttccacggcagaagttccgcagcgctgttctgcgtttttccagcctccgtggaacagaatgatgaaaaggactttccagaagccaggctgcccgctgttccgggccggaggcgttttgtggtattttttgcggcccagccagaagacgaaggtggcaactcccatgaagaggcccgggacggcaaacgcccaactgtacccgtaacgctgttccatggccggaatgaccaggaaggagaagaaggagccaaggttgatagcccagtagaaggcattgaaagccttggtcattaactgcggggacttattaggaatctggtctcccataaaggcggagacgcatggcttgatgcctccggctcccagcgcgatgatgaacaggcccgccatgagaatgtaacggcgcgcttcaatggtgtggaaaagatccgccgtcgccagaactccgtgtcctacgcagtaaagcagggaaatataaagaatggttttatatcggccccagaccttgtccgccagccaggcccccgccaggggaagcagataaaccattcccacaaaaatatgaagggtggaggtggcccagttgtcgctcatcagcagatggcccgtcatgtacagcatgaggatggacttcatgccgtagaagctgaaacgttcacaggcttccgttccgatgatgtatctggactgggagggcagggcgctcattggatgatgaaaaggagggagatggagaaggagtaataaaaatgatggcctccgggcggaggccatcatggtgaatgcgttcagacggtgttcagggcctgtgagaaggagacgggctcactgacggttgtcatgaaagggaaaacgttagcgttcctggttcaggatgggagcgatttccaccttatattgggtgatgcacgctttcagccagtccagcatgatcatggattttgcctgggctgtcagagccggagcaatttgctgggtagatttgatttggaattccggcgtatcctccagttcgcgcttgacgagctgggtcagcaggatgccgtcccccgtgttgatgggctgagccatctggccggggttgatgacggaagccgcctgaaatacttcttcaggggccgggagctctttgggaggggccagacgggaattcatggcccgttccagaagagactggagctcttcctgtgtttttgcgttttgcaggttgacgctgctcaagagtacgtttggattgacaaagggaccgtaagaggaagttttggcaccggcttttccggcaatggcattgaactgttccacggggttttccgccttctgcaattccgtattgagttccgtggcggccttattcatggattcaacggtcatgctttccagcaggtcggcgcgggcgctgttgcgggcggtctcgtaaggcagggctttgaccggggtaatgccttccagacggatcaggacgacttgtccattttccagcacctgcatggtgctgatctgttcggctccggtcttggcgtgcgcttcttcaatggccttggcatccgcatccgcactcagggccggggctcccgccagggagaaagccacatccagcagattggcgctgcgtccgtcggaagcggattggttgattgcctggttgatttcctgaggcgcgtttttacgcgttacggccatgtaggactttttctccattttgcagacgccgggagtcttggccagggcttcgctgatggcctggtccatgttcctgccgttggtggcgttcagcggttcccagatgtcattttccaccagattcatggtctccatggtggcgttggaaatgtctccgggcttgggtgcctgggcatcgcctgcgggaatgaaggtgtaaacggtgaagaagcgagcttcctcatttttgtaattttccttgtgcttgtcccagaaggtttttatttcctcttctccgggatccgtcttggggcggaaggcgcttttttccaggaaggcggtgttgattgtaatttgctggctgttggattccgctacagcctcggcaaaaccgggctccacggagatacccccggccagcacgtccttgatgcgctccaggctgatggtgtcttccatcagcccgcgcagcagttcctcctgaagctttttacccatgttgccgcgcatggaaatgaaattatcgtatttttgggggtcgaaaacgcctttatcgtcctggaactctggaatattgcaaatggcatcgtcaatttccgcggtgctgggagtcaagcccaggcgccccgcctcccggcggataatgccgcggtaggccaggaaagccgcgttgggattatttgttttcagcagatggcagaattcgcgcaggttttcttccgagctgaaattgtcctgaagcagcggaccgaaggtggaagggaaagagaaagccacggacaggccggtcctgcccatattgttataatccttttccccgtaagatttcccgtccacggaaacgaaagtctgcttgaacatgccggtcagggagccgccgcttacgtccccgccgacgaacatgaggcccacaaacactagggccatggctgccatgatgacgattgtatgtttacgtaagtaatctagcatggaatgtcaggttgaaaatgtacgtgtagccgaccatgagctgacggcagcccgggcagcccgaaccttttacactttttccctccgctaggcaagaacgaagctctccgcttccggcggcttctccagaatatggcggcatgctctttcctgtcatgaagggcttttccggccggggctgaacaatttttgacctcgacggtgatgcaaatacgccttatgttgctcctgcacggaagatcccgggaaccatgggtcggttctgccccatggcattcggaaggcctccggtgcatgtccttagccggatattcctttaattgcaaggatttatgctgaaccaggtagtagaactcaaaagagaagtgacggcggtccagatccccagcggggatgtgctcaccctgccggaaggggaacgcgtgtatatcacccagatactgggcggctcctataccgtggctacggaccacggcctggcccgtatctccagggagaacgcggacgcccttggcgctggagcggaggaaccttctccggaagcagctgcgctggatgagaacgccacactggaagaaagggtatgggatacgctgaaatgtgtgtatgacccggaaattcccgtggacatcgttaacttgggtctgatttacgatgtggccgtcattgagctggagaacggccttcatcatgtggcggtaaaaatgactctcacggcacccggttgcggtatgggcccccatctggtcatggaagccaaggaccgcattgaagcgttggaaggggtggaggctgcggatgtggaaatggtgtgggatcccccctggaaccaggacatggtcagcgaggagggcagaatgaaactcggattgatttgatttcccatgccggtgacgttgaaattgtccgacgaggaagcgcgtgatttggcggaaatgctttccactgccgccacggtggctgcctccaatcagcaggacggggcggaggcgcgtctggcggcgtgggggaatttggtttcccggctgatgaaagagctttccgtcacctccaaattgaaagggcgcattgcctatgcggatgagctgggcggctatgccttcacccgggaatatgaagaaagcgcctttttccaggattgtctggatgaataccgggacaactctttttgggcggatctcgtgacgcgtatggcggacaaggccatcagcgaacacctggggccggaatattttgaaaacatgccggaggatgaacgccgccgtactgcggaagccctggaaaaatccctgtggcaggaatgcgccagatacggcattgaccggctgggcttcatcttgcctccgtcagacggataaggagaagaaccgtttaaaaatcctgtggaccggtgcggcccgaatgattcgggcgcgattcgcgtgcatatccccggagaataccggtctatgttgcctgtctgccgggaaatactcccttatatccgccctgtttcaggtatcgggacgacatgcgctctctctggatgcggcaagatgattttgggggagttgttcagtccggagtgcagcggttcaccgggtcggggccttattcctccgcattttccggcagtggcggggtggggctgcccagatattccgtttccttgggggtggagagtactttgtaatacgcccaagcggcggcggccagtacgccgccgatggaaacaatcatggttagccagccggtgggggacataatcagttaatgttctcctgaacaagactggtaacggccttgtcaggcaggaccagcttgatattctggggcaggggacgattttggaacagcttgaaatccgtcattttcgtagttccccccgtctgaagcagcacggaaccatcaggctggatattcgccatgacgttggtggagggggttgggtcgccggtgaacgttacgctggtattgggatgccatttgccgtccttgtacgcgaagctggggccaaagaaggctccgcgggccttcttggctgattcaaaattacgcatgaaatcttccacgaatccgacggagaaggaaagttccttttccgaggaatgcgttttccatttggaaataagatcccaggacctgcttttattattaaagtaataaccgctgatttccttgaatttccccatttttttgacgcagacgaggaagcgcatgttctccccgattgcccagggatagtccacgaagctttgtccgcctgttccttcaccgccaaaacgtccggagcgcgcatctttgcccagttttaccagcttggtgcattcttcttccggcacatcattggggttgtctccgtgtgccaccggatcccagatggagaagatgattacttttttaccgttggattgttcctgaaaaccgatatagccgtcgtcaaaattcatggcgcaaaagtaggtgccgggaacggatgttttggctttcactacattgtacagggcgcttgcctgggagggatgcccctgctggttgatatggacggaacggcactggcgcttggccagcagttccgggtcctgcgcatgaaggatggttccggagaacagggcggcgcaaatgacggcggcggaggataaaagacgcatggttttgaatgattgatggttgtctgatttgatgcccggagggtgggggacaggcaaataattaggacaggctaattacgtttggcctgggggaaatctcgcaggcaggccgcacttttttcaaaatttttccggcatgaatgtgataaaagaaatacttggctcaggctggttgctcaagattctgaaacggctgaaaccgtaagtccggaaggccgggcagccgcactctctccttccccttcccgcttttagccagacgacgcggaacatacagctttgcttgaatggggaaggccgttctgcgaaaaattcgggaaacggccttcggaagaatgggggaaaaggacgcgtttgttaccggatggggttcaggaacaggggcatcaggccccccagcacgatgaagatggaaaacgcggccagcatgactccggaaatggccggtacctgcacgggttctgcgttttctgcgggcttgtcccagtacatggagcggatgaccttgaagtaatagtaaaacccggatgctgcgcagacgatcatgacggggagcatccaatccagatacagacccgtattgatgacgtgcacgaaagaaatcattttggcgaaaaatccggccgtcagcggcacgcccgccagggaggcgaacatgatggtgaccgccagcgccagccggggattggttttgcccagaccgcggaacgcggaaatttcctcgctcccgcgctggatgcggatcatggcaagggcgaaaaaggcgccgaaggtcatgaccaggtacacagccaggtagaacggggcgttcggagccaactggccgtccacagtaccgataaacaggggcagaatgaagcctgcctgtgcaatggaagaataccccatcatgcgtttcaggttcgtctggggaatggcgcccaggttgcccaccagcagggtggcggcggccatcagggctacgacgaattcgacgggaggcagcacggcgaatggggccaggatgatgccgagcagggcgaatccggctaccttggaggctacggaaaggaaagctgtcaccggagtgggagctccctggtacacatccggaatccacagctgcatgggaactgcgccgattttgaatgctgtaccgagcagcagcatggcgagggccaggtacatggcgggggctgtctggccggccagggcgtggctgacgatcgtttcattataaatgaatgttcccgtaatgccgaaataccaggccaggccgaaaacgagaaaccccgtgctgacggcgcccagaatcaggtacttgatgcccgcttccgtggaacccaggttccgccggaagtagcctaccatgatgaaggaactcagggtgagcacttccagggagacgaacagttccactaggttggatgccttgcacagggaggtgatgcctacgcaggccagcaggggcaggatgtagaattcccccgttccgtcctgggatttggaatcattggaggaaaggttgatgacggcccggaaatctacggaaagcaacagggtgactgctgtggcgacgagcgccaggatgatgtagatgttgtcatagagcccttccatgtagaagggaagcatcgccagggttcccgccgcgccaatcagcccgaaaataaatttgggcgtttttttgcagaaggtctccgccagaagcaaaagcattgccaggccggccaggatgaattccggaatatacgcttgcatgggtaaaagagaatcaggttagactaggattgtattcggaagggaggaaatcaggagaaaaactggagcaccagcgtggggaagaagccgaagaccgccagggcgatgaccaggaagcagttggccgcccgttcggagggctgcagtcccgtggcgtaggcggaggctttggacaaatctccctggaaaatattgcggtaggccctcagcatgtataccgcgccgatgaccagtccccagaggcacaggatggtggcgatttgaacggggccgaagccgttgctgaaaccggcgaaaccggagaagaagaccatgaattcccccgggaaattggcgaggccggggaggccgatggaagccatgcccgctaggccgaaaacgaaagccatgcgcggcagcctggtgctcagtccgcccagagagttgatttccaatgtgcctgtttgcttttcaatctgcccgcagagcagaaagagaagggcgattgtcaggccatgggccagcatcagcagagcagcccctttcagcgcccagggattggcttccgcggaaccggaaactaccagggcggcgaaagccaggaagatatagcccatgtgcatcacggaagagttgcccagcagcaggtccagccttttctggttgacggtcacgtaccccacccaaatgacattgcagacgagcaggaccagcaggatattcgtccagggaaggaatcctgtttccatcagcggctggaacatgaagagcccgtacaggccaaatttcttaagcactccggcatgcatcatcgctaccggagcgggagcggatgcgtatgcgggggctgcccaggaatggaaggggaagagggaaatcagcgtgccgaatccggcgatgagcagggccccgatgagttccgcgtgggcaagttcgcgcccgctggccatgaagtctttcaggccggagaaggtgaagccagcctgcgtgccgatcatcagcagggctgccagcagcaccatggaggcaagccccaggtaaagcgtggcgcgccaggccgtggtgcggcggtcgccgcgtccatacaggccgatcatcacgaaggtggggataagagccagttcatggaaggcgaagaaggagattatgttgtcggacaggaacgccccggtggcgcctgcggaaatcagaagggcggagttgtaccaggaagcttcccccccctggggcgggttggtgcccaacacggtggcgaaggtaaccaggatggtcagcagcagcattactttggacagggccggggccaacgtgagctggaggtccatcccttcaaagcgggaccagcaggaagaacagccgtcaaagctaaccagggcccagatgccgagggccagcgtcagggaggcgctgagcagggctgtcgggcgtgcgggcgccttgcacagaccgatgagggccgcggcaatcagaggaatgagaacaagccagataagcatggtatgtgattggttggttaggttagcaggaatagaagacggtaaagtagatgaccaggagcaggccaatgccgaagagggccgtataggcggccatgttgccggactgcaggcggcgcagcagggagcctatggcggcggtcaaccgcgccagtccgccaacgatgaggccggagatgatgaactggtccataaagtcgatgatggcggccagaacgccctggactcccctgaccagcactttatcatagaacagatcaatataaaggcggttggcgagagcccgggaaacggcattgccggagagtttgtcagaagccggggatcctgcgtagaaggcagccgccagcaggattccgagcaccagcgcccccatggagacgtagaagggcatgcccatgtggaagctttcggaaacgaatccgttgaaaggaaccagcctgtctgcgatgaacccgtagccggagatgagagccaggacagccagaatcagcaggggcaccagcatgaggccgccaacttccgaggcgtgttccgaactgtggctgcggctcttgccgaagaagaccacaaagatgacacgcatcatatagaaggttgtcagcagggctacgcccgcgccgatccagaagaagatcgggtttttgcgaagggctgcttccagaatggcttccttggagaagaagccggacgtgaacggaatggcaatcagcgccatggtggcaatgatgaaggtgagggaagtcagcttcatgcgcttcatgatgccgcccattttccagatgtcctgttcatggtggcaggcgaagatgatggcaccggcgcccaggaagagcagagccttgaaccatgcgtgggtgaagaggtggaacatggctgcctccccggccagaagtcccagggccatgaccatatagccgagctgggagagggtggagtaggccaggacgcgtttgatgtcattctgctgggtggccatgaaggcggctatgacggccgtaatggctccgatgccggcaatgacattgcaggccagggcggggaaggcctcaatgccgatggagtattggacgcgcaccatcatgtaaacgccggcggctaccatggtggccgcatggatcagggcggagacgggggtggggccttccatggcgtccggaagccagacgtgcagcgggaattgggcggatttgcccaccgctccgcagaagaggcacagtaccgtaatgttcagcaggttttcactgattcctgcgggtatttccatcaggctgaaatccagcgtgttggtcagcgcccagagagtcagaatgccgatcaggaagccgaagtccccgacgcggttgcagatgaaggcttttttggcggcgttggcggcagtgtcccgtgtgtaccagtggccgataagcagataggaggagaggcccaccaattcccagaagataaaggtcatggcgatgttgttcgccaggacgatgcccgtcatggagaacatgaaaaggctcaggcatgcgaagtagcgtgttttggccttgtcgtccgccatgtaagccagagagaaaacatggaccagcaggccgatgcccgtgaccaccagcatcatacgggaggaaaggggatccagcacgaaacccaggtccacggaaaagatgtcggaaatcgggagccaggagaaggaatcggatccggtccggtccagcagacccagggaaaggacgaaggtcaccaggcaggagaaggtggaggtaagcgccgcgacgtcaggacgtttggtcagcaggaaccagtcaaaggcggctacgaccagcggcaggaagagcagaagccaggtgtattgaatatcaatattgaacatgttcgtggagtagtgtgttgctcttagtctttcagcgtgttgagatcttgcgtgctggccgtgcgcctggccctgtacagggagacgatgagggccaggccgatagccacttccgctgcggcgatggtcaggataaagatggagagggcctggccgtcatagttgggcaggcccatagtgccctgggcgcgggaaaacgctaccagggacaggttggcagcactgagcatcatttccaggcacatgaagatgacgatgatgtcgcgccggacaatcacccccatcaggccgatggcgaacaggacgccggagaggatcagataatgcgtaagaggtatcatggtgatggctgtggtaaggggttctttattttccggaagggcggcggctcagcacgacgacgccgatggaagccaccagcagggccagaccggcgatgaccaggctccggttgtatttgtcaaacagggtacggcccagcagggcggtgtccgggaattctccgttgtctatctcctcacggatggtggtgccttccggatagaggtgggcggaacattggggggagaggggggggagaatgacggaaggggcgccgtcgttgcgaaggctacaggcgggagtttccattccggttttggagggggctgcgtcctcctgcccgattttcaaatcgttccaggcctgttccgcgctggccatcgggcagcggtgcgtttctttggcgccgggcaaagaatagatgatgccaataagctggccgaggaagaggcaggcgatgatgacaccgatagcgacggagaaaggcctgctgaagggggatgtttcctgcttcacattcagcagcatgatgatgaacgcgaagagcaccataatggccccggcgtatacaaggatttggagaatgcccaggaagtgggctcccagcccgatcatgacggcggcggtggctccaaaggaaagagccatcatcatggcggaggagacggggttgcgcatgaagacgaccatcagggacaggaccacggccagggccccgaaaacgtaaaaaagtatgtcgctggcaaagatgttcataacgtacgggaaatggagtgttcgggggttatttgtattggttccacttgttgaccagccccttgcgggtgccgcccagttcgtagagcttggccttgttgtggatggcctgggttttatccgtgggggtgaacaggtagttatggctcatgaagatggcctgttccgggcaggcttcctcgcacatgccgcagtagatgcagcgcagcatgtcaatctgaaattccctgggggctttttccactttgccccacggtccttcctgtatggggccgggggtgatggtgatggcgcgggccgggcagatgaattcgcagagctggcaggaaacgcagcgttcacggccgtcttcgcctttcaccagcacgggagctccgcggtaatatttcggcagatgtttgtcccatctggcttccggatattgcatcgtaacgccgatgccggaaccggccagttcttttttgttgcgggatttgcccagcagagccagaacgaggtgcctgatagtgagccaaagaccgccaagaatggattgcagatagaaccgctctccaagggaaatcttcggacgcttgatcgttttgaaggccataatagtaatgttgtcggaatgaagaagggggggattacttgacgaagtacaggatggcggctgtaaggaagatgttgatgacggccagttcaaagaagaccatccagccgagcttcatcacctggtcatagcggaagcgggggagcgtccaccgcacccagacgaagaagaaggcgaagaagagaagcttgagcacatatgcgatgagctggcagatgaccgccacccagttggctacgttttcattgagccagccgtccaggccgaagccgatggaccagccccccaggaacagcgtgatgacaagggaggatcccaccaccatggcggcatattcccccatgaagaattgggcgaatttcatggaggagtattccgtatggtagccgcccacgaggtccgtttcacattcggacatgtcaaacggcgtacggttggcttccgcaaaaatggaggtgaggaatatgatgaaactgatagctacgggcaccagcagtatccagcgctgccagctcaggccctcgccccacacgggaagcaggagccagccgttggcggcctggtattccacgatgttggacaggtccagcgtgctgtaaatcatcagcacagggatgatggacagacccatgctgatttcataggaaatcatctgggctgaggagcgcacgccgcccaggaaggggaatttggagttggatgaccatccggccagcaccagtccgtacacggagagggaggagatggcgaacatccagagggggcctacgctgaggttggccaccgccatgttgacgtttccgtaagaggtttgaaggtctccggcgaagggaaccacggccgccgtcatcagcggtggcgcaagcactaggatgggagcgatccagaagtatacgcggcgtacgaaggggggcgtgaaatcctgtttcaggaacagtttgccgccgtccaccatgggctgcacgagaccgaagatggggatgtcgcggtccaggcggaaaaaacggcacaggttggcgattttgccgtcatggggcaacccgaagtagtccagcgtctttttgaacggcaggtcggatttcatgccgaagcggcggaagatgcttaacggaatgccggcgcggttggggcctacgcggtcctggatccaggcggccacccggcgttcaatgtacacgcagaccggaatgaacagaatggtgatggcaaagcagatgacgattttgatcagcagagtgatgatataaaaccacacagggttgctgagcacctcgtcgcaaaaggttagaatcgaatcaatcatggcggattaacaggttgtatgcgtgtgaagtgtgattagcggccctggtttttttcgcgttccaccacgggaatggtgacgccggtttccagaatgggctggcccccgtctccgatggaaccccaggagactccattgagtgcgccgtattccgtgctcatggcggtgaggatgtccagggcggagttgaagtctttcagagcaggattgcctcccagcagaagggtgatgtctctgaaaatctgccagtcgtcccgggcgtatcctatgggctggatagcgcggttcaggcgttgaatacggcccgtgacattaatcatggtgccgaatttttcagcgtaggtgacgcccggcagaaccaggtccgcatggcgcgccgtttcattggcgctgtgggcggtcatgaacaggtagtccagcttgtccagatcttccgccgtgaagcctgcttccggggagatgaggtcttcccccagggagaggatgcccttgacggagccgctgcgcactccttcgcgaatggcgtccagcctggaaccgggttcgatatccagcaccagcctggccccgttcgtgttcgggttgcgatccgcagaaataagcatgccgtcgctttctcccatgcggggaacgatgtccaccatatccgtgccgatttgggcggccagatggcggaccatgtaaagctcttcattggtcatgcgcccggaggcaatgatggcgagctggttcggagcaatgcgcttgacggcttccgcggcggaagccagagccggttcccaggtggaggggcggtggggcgcttccgcatccgtacggatgacgggctggggaatgcgggtttccgcattgatgtatttgtagttaaggcggtgagagtccggcatccagcaggagtttacggcatcattctggcgcggggtaatgcggtataccttgtcttctcttgtccagagggtgatattggtgcccgttccgcagtccacgtcaatggtctttgtttccttcaggaaccagacgcgcattttaaagcggaaatccttggaagtaagggctcctaccgggcagaggtccacggtgttcatggagtagttgctgtccagctcgcggccggggtaaaccgtgatggcgttgaaggtgccgcgttgggacatggtgagcacctcatcgtgcatgatgtcgcgcatgaagcgcacgcagcggccgcagagcacgcagcgttcctggtccaggttcacgcgcggaccaatgctcaggttttttccttttttggtctttttctcttcaaaacggccttccacctggccgtagtcgttggagtattcctgaagcttgcattccccggcctggtcgcagatggggcagtccagagggtggctggtgagcaggaattccattacgccgcggcgcgcttcactggccagggggctgtccgtgcggatgcccatgttttccgccaccgtgtttgcgcaggagatgatggggcggggcatccactggatgcgctgatagccgttttcatcataggagggtgtctgtcccggagcgagcctgggcggcatcccctgttccaccatgcacatgcggcaggagccggcgacagccagcttggggtggtagcagaagcacggaatgggcacgcccacggaacggcaggcgtctgcaatccgcgtgccgcgcgggaaccggtgccacgttccgttgatttggacgttcaccttgccttccgcggcggcaatgtctttggggagtttggaagcttcttcactcatgatgacggatgggagagggatggttttgagaactggtgttgcgtgctgctgtttagcgggtgaggaaacggttttgctccctgccttcctccgtgtggggcagacaggcgttgaatggatccgtcagggctacgaattcctccttgaatttggagaccatggcctgggtgggccaggaggcggcttcaccaaaggcgcagaccgtttttccttcaatctggttggccacttcaatgagcagatccacatccgacggggcggcttttccttccaggatgcgggtgctgagtttcatcatccacggacagccttcccggcagggagtgcactgcccgcaggattcatgggcgtagaaacggttgatgttgttcatggcccagggcatggagcgggagtcgtccatgacgatgaccgcgccggaaccggacatggagccgtgccgggcgatgctgtccagatccagcggaatgtcgaagaaggtgatttttcccatggtgccgtccggattctgcactttgtattccgcatccgtgcgcatgaccttggaggaggagcctccgggtatcacggccttgaactggcgcccgtcccgcgggccgccgcagacgtcatacagcagttcgccgaaggtcatggagccggagacgatttcatagaacccaggacgtttgacgtcgccggaaaccccgatgatgcgggtgccgggggaacgtttggctccttcctggctgtaggcttctcctcccatggccatgatgtgtttcacctggcagagggattccacgttgttgacaatggtggggcatccgtacaggccgatggcggccgggaagtaggggggcttgatgcggggataggggcgatccccttcaagggagttgagcagggccgtttcctcaccgcaaatgtacgctcccgctccgcggtgcaggtggatttccagattatagccggacccctggatattgctgcccaggaagccgcgttcgcgagcttcctgaagggctttgagcatgatttccgcggcgatgggaaattcttcgcgcatgtagatgtaagcctgatgcgctcccaccgcgtagctggagatgaccattccttcaatgagctggtggggatcctgatggacaatgtagcggtccttgaacgtgcctggttcggattcgtcacagttgcaaaccaggtaaacaggcttcgtgttgttcggcggaatgaaggtccatttcacgccggtggggaaccccgcgccgccacggccgcgaagaccggattttttcacctcgtcaatgacggccctgggctccatgccgagcgcctttttcagttcttcataaccgccgtcggccagatagcagtcaatggaggtattccagccctcgcggttgacgtttttcagaatgcggcgcgtttccctggggtggggttctttaccgggaagataggtgatgctcatggcgaaaatctggtgcgtgggaaatggaaagggttaggctgtctgatatttggcaatcacttcttccagcacttccggagtgactttttcgtacaggagatcgttgaccatcatgttggggccaaagccgcagttggccaggcattccactccttccacgctccacaggccgtccgggctgactccaatggggtggtggtggtcgatgccgtttttgtcaatgcccagacgcgtgcagatggcgtcgaacaggctgtccgcccccgccatggcgcaggaaagagtgcggcatacgcggatgtggttttttccagggcacatctggcgcagaccgggatagaaagtcaccacgcccagaacatgggcggcggagatattcagtttttctcccacccaggcaatggcgtcgccgctgatgaagccgaattttttctgtatttcatgcaggatgggcaacacggcggatttttgcttgccttccgggtaatgcgtaacgtattcgctggcggcggcgtcaagttccggcgttacttcaaaggccgggtaaaaccgttcgcccgggctgggctggtgggcgatagtcgcgtcgatggcgttttcagcgtaatcggacatggggagaaagtttggtgtttgcgttgaagtggatgaaagtggcgggtgtttaacggtcgcattcgcccatcacgaagtcgaaggagccgagaatggccggaacgtcggaaaccaggtggcctttcatcagttccggcaggatggacaggttgcagaaggagggggagcgcatgcgcaggcggttgggaagcccgccccccttggagtccaggaagaaacccagctctcccttcgggttttccgcggcaaagtaaacctgcccggcaggggcgttcacccccatggtcgtcgtcatgaactggcgaatcagggattccatgtccgtcaggacttttttcttttcaggcagcgtgcctttggtgtccaccatgttgatggggccgtccggcatggtttcaatgacttggcggatgatgcgcagggactggcgcatttcttcaatgcgcacggtaaaacggtcgtagcagtctccgtgttcgcctacggggacgtcgaattcgtaattttcatatcccagatagggggtgagtttgcgcaggtcccgcttaatgccgctggctcgcaggttggcccccgtaataccccaggaaagcgctttttcacggctgatgacgcctacgccctgaagacggtcaatgaagattttgtttttgagcaggagggcttccgtttcatcaagggttttggccgcttcatcgcagaagacgagcacttccttgagcatttcattgggaacatcacgtgtctgtccgccgatgcgggtataggaggaagtgaagcgcgccccagtgagctgttcgtaaaaattatggattttttcacgttcctcataacagtacaggaaaacggtcatggcgcctacgtccatgccgtacacgcctacgcccaggatgtgggaggaaaagcgggaaagttccagggccagtacgcgcagggcctgtccgcggggcggtagttcccatcccagcagtttttccaccgcgcaggcataggcgatgttgttggacaggggggccaggtagtcaaagcggtcggtgtagggaacaaattggttgtactggatggtttcgcctattttttccattccgcggtgcagatggccaaccaccggatcacagctgatgatttcttcaccatcaagttccagcactaggcgcagcacgccgtgggtggcggggtgggaggggcccacattcagggtcatcgtttctccgagcggttcggatgtattggtgagatagtctgcgttagcggctgtatctgcaatggcgaaagttttggtgctcgtcttcatgtggatgtccgtgcctggctgaacctgataatggtgccggacgattatgccacttcacaccatgcgggcaagccaaatgtcagtttttttggcattccggggaggtggtgcgcgagtctcctcaactgatgaatgttagtcctttctaacaataagcttttatatggaacctgccgaatatgggaaaaagcggattaggaatccggagtcaacctacaaatttgagaaaaaataatttaatgcaaatttgctcagttatttccgaatggcgggtgccaggaaaacagggctgccgggccttatggctggacgtgtccgaacgcagcggaggagaatcttcttcctttgtagccggcctccctgcgtagtccttttcgggattcacgttatatgcggattcctaatccgttaggaaaaaaaatatgttgaagccgaggagaatttttgtctttcccattgctgtaacattttcagtattatttattttatatattatttcatggttttcccctattgccggggattcctttattcacgacaggacggggtaccttgggcagtttcatatccgccatgtctggaaggcctgcgtggacagttacctgtattggaatcccaggctgggggaaatggctgcgttttttattacttctgctccccggctggtctggacggtcttgaatcccgtgtttgtgcttgcccttgttcttggcctttatgtgctcgctctggggagaatgcccaatctccggcgggagtgcggagcatggacgtggttgtttgctttaagcatgttcgtctcagccggggtaaccgtttattatgtctgcctgacacgcgcaggctccatgaattatgtgtggaccggatgcctgatcgtatggttcatgaatatttacagaaccaggtgggggaagcggataacctcccctcgatggggcctgtcctcaggatgtctgatttatgggattttctgcggtgcctgtaatgagggggcgacgataggaatggcggcggcgttttgcatcatggccgcggtcggcatgctccgggaccgcagggttggcgcttatgtatggtgcgggtttgccggcgttgcgttgggaggcctgtttctatttgccgcccccgggttgtactcgcggcttggccatgatttgggagcgagtgaagttttgaggaagggcggtttttgcgcctatgcggagtctttcgggatattgctttattaccacgcgaggatgctgtgtaaaatatatgccgtttccgcagtattaacgggatttttgttgttcagcggcacggagcggtgccgggaagtaatcaggaaggaaaaggaatccttcttttatattctttttttattgttgctggggggcatcatgtccgtttgttattttccggtgtgcattcccgcccatcatgttcagttcgtgtcgtccctgcccgttttggcggcgtcaaccgtgttgttctccgtattgtaccggaatgagatcatggtgcgcggattgcgcgcggtgactgtttgccttgccggagctactttgtttttcggggtggtgttcaccctggagtattatcatgtaggctctcaggctttccagagagaggagctgattcataaggccttccaggaggggaatctggaaccggaagttccttccatctctcctcttttctttgaaggaaaagtatccggaacggatgggaattggggtgggccggataccaaccgccggtttggcatccgcaagctggtagtgaaaaagccctgagggaaaatggctatttgactatgttccggggagtgaagtgcatttcctgttcctcgatgccgaattgccaggtggccgtttgccacatgttgacagcaggatttttccaacggacctggacggttacggggctgagccgcaggggacgggagggagtccatttcaaaattttttccttggcgtcgtaccgggcgtttaccaggccgaagccggagacgcgcatttccatttgcttgggttccaaggagggttcccctgccagggaaatggatatatcgggagtctggtttttcaccacggtattggcggccggataaacgggctgggccggggccgggtaggaattcagctttttcccgctgctgttgccaggggtggtcgccggggtttccggagtggagggaacgttgaaattcagggctctggtaaatgtcttagggtctttgccgaagaccatgtagcggtgaatccgccagcggtccgtgtccttggtcacttttttggggattaccgtaaaggccgcctggaatccggcttcttccgccttggagatcatttccggcaggatgaagccgccaggatagcaataggcctccacggaagaaccggggaatttttcctgaaggattttccgggaattgcctatttccgccgttgccagatccagaaccgcttgtgtacctttccgctgggcggccctccaggatcttgggtacaggtggctgacggagtggctgcccagggtggcgccgttattcagcatttcctgaatctgggcggggctcatggcagaaccgcggcccgtgatgaatttggtgtatgggaaaatggtaaaggggaatcccgtttctttcaggatgggataggcgtccgtgtagacgctcttccagccgtcgtcgatggtgatcatgacgcatttggccggaagctgtctgtcccccagtttccattccagaaattccttcatggagatgacgggcactccggacgccttcagcgcctgcatctgggagcggaatacatccgtattcatgcgcatttccgtagcgggaagggtgcggctgaaatcatggtaacccagaatggctacgcgggtttcatgctgaggaaccggaacgggggaaaaagccgtggagggaatggcaagggatgcctccgcaggttgtgccggggcgtgcaggttcgtttccccgggaatgggttccgcgttagggatggactccgccaggggagcggaagaacctgtctctccgggaatgggttccgccatggggatgtattcatccttgcggttggcttcaatcaggtctttgacgggaacgatgccggcggccgggtttcccttgatggttcccccgatgaccgggccgggagcaaagggaagtggagacgccggcggcaggtcgggcggaagctccgcacatgcgacaccggctgcgatcaagaaaacggaaaggaggcctgggacggagcgcatatctgcaactactatttttaagttttctgttcaaccttaaactcaggcaggcatgacagcctgttccgtgccgcgcgcgttttttccggggcatgtctggattttcccgtttgaatgcgttatcgctaaaaagcatgcagactcattttccgctcgcggaagaaaggagaggcgtttagtctgtctgcagacatgagctgtatttgtcatttcttcaaagttctggcgcgccgtgcaggtctgctcactgccgtagttgccgccgtttttttcctgggggctcccgccggtgaagcttcggcccgcacggcggctcccgcttatccggccgcggaagtggggggggaatcccagtacagccattttcccattcctctcaatcagtacaatccggtgccgccggatgccagcctgtaccaggtgcttagtgaacgcaacaaacagtccggcggtttcaacctggcagtgacgctcgttttcttcggcgctattatccatacgtttctggccggccgctttgagcgttattcccataagctggccctgcgctacaaggaaaagctcaaggaaaccaacttccgcgtgatgcatccggaagagcgcctcccggtttccttcgcgtccgccattttccattttctgggagaagtggaagccgtgttcggaatctggcttatccctttcatgttcgtgtgctggaagtattattcctttgaggatttttccgcctatttgaattatgactgttccttcacggagccgatgttcgtgatgattatcatgattatcgcttcttcccgccctattttcaagctggcggaatatgtcgtgaactgcggcgccaggcttgggaaggccacgccgggcgcgtggtggatttccgtgatgtgtctggctcccctgctgggttctctgattacggaacccgccgccatgacgatcggagccctgatcctaagcaagaaattttacgacctcaagccgaagaaaaccttgatgtacgccactctggggcttctcttcgtgaatatctccatcgggggcaccctgacgcactttgcagctccacccgtagtgatggtggcggaaaagtgggactgggggctggctcacatgatccagcatttcggatggaaggccgtttccgctatcgtcatttccaatttggcgtattttctccttttccgcagggagttcgcccgcctggcttcccagcagagggagttcgacgagtttgacgacgccgttccccagtcctgggaagaccgcaatgacaagataccgttgtgggtgaccctggcgcatgtctgcttcctggtctggacggttctttttgcccatgagccggtcatgttcatcggcagtttcctgttctttatcggtttcacactggctacgccgcaataccagaaccaaatgtctctgcgtgtgcccatcatggtggggttcttcctggcggggctggtcattctgggcggcgtgcaggcctggtggctggagccggtgctgacgcggctgggggactacgccatggtcggggctacgctgctgacggcatttaatgacaatgccgccgtcactttcctggcgtctacggttcccaacctgccggaagccgtcaaatattccgtggtggcgggtgctgtgacgggcggcggcctgacggtcatcgccaacgcccccaatccggccgggcaggccattctgggtaaatatttcaaaggcatcaatcccctgtggctgtttgcctgggcggcttttcccactgccatcgtgtttattttcttcacctgcttcggccattaatggccggagcgtgctatcattcttatgtttaccggactcgttgaaacaacaggaaccgtggaaggatttacgcctattaacggcggagccaggctgacgctgaccattccgttcggccgtgaactttccctgggggattccgttgccgtcaacggatgctgcctgacggtggatgccctggagggtgaacgcatctcctttgatctgctttcccagactctccgcgtcaccagtctgggaaccctcaagccggggatgctggttaatctggaacgcgccatgtccgccatggaccgtttcggaggccacttcgtgatggggcatgtggaccataccggtacgattgccgctctggagcctgtagggcaggaccaccgtttggaggtgcgcattccggaggaactcacccgctattgtattgacaagggttccatcaccattgacggcatttccctgaccatagccaatttgagcggctctctgctggagttctggattactccccatactttcggccgcacgaatctgcagaatgccgttcccggccagcctgtcaatctggaagtggatatgctggccaagtatgtagagagactgttttctgcccgtgaacaacgtgcggagggatagtcctgcccgtaaggagaatcacatgccgggcatgcgggctggtttttcctgccggacaatgagagtgcattcccgttttctgcagcagaggggccgggatgcggagatttttgaactggaagccgggtattgctgttccgatgaaggaagggccgtgagggcggaacaaaaatgcggagcgggtttatttgctaccgggccattcctccctttgccgtaatccatttcccgcgtttgacgacccgttcaaagaacagaccgtgacgttccgctgccgttttcgtttcttcccactgggaagccagaatgccggagatgaccaaagcggcatccttcttcatggcggcgatgatttgtggaaaagctttttgcagtatggttgaaaacaggttggcgacgacaaggtcaccctgctgggattccgaaggcttccatttgaagacgtcttccacaaataagtccagctgttccgccgtaacggcgttgcggaccatgttgtgccgggccacttcaatggccatggggtcaaaatcgaaagccgtggcgtgcttcgcccccagcttaagcgccgccatagccagcacggcggttccgcagcctatgtccgtcatgctccatgatgtttttctgcgggatttggcagcgtcgcagatgaaacgcaggcaggtggatgtggtagcgtggtctcctgttccgaaagccatttcggcggggacgctcaggatgcagcgcgaggggaactgtttccgcagggcggccagattctccggagaactctgctccgtaatgaccagtgcgtcccttattttgagcggagggcgtttttcccgcttctgggtcgctacccagtcctgcgtcttgatttccctgacagttcctccaaaatattttttcaaggccagggcgtcttcttcatcatcgcagtaaacggtgattcgaaccgttttcccccctttgatttttgtaataacggcgttcggatttccggcgatgcgttcgctccaggcgtcttcccatttggcggcggaaagtttgttccaactccatgtcatgcagaaagtatgggatttttccggcagggaggcaagaatggattgattgtaactgcattccctctgtttttggggctgtggggctctattgttgaaaatttgatttatttaaagaagaatataaaacatcaactatcaaaccattttattttcagtatggttgcgaatttggaatccggagtaaagattatttttttatattcaatgaccaacctgtgagaagaggaaggaatcttgttctattccaatctttttttctaataataattcattgattgttattttgttgttttgagtttcgaataacaacggattccaaattcgtacattaaaaggagcgcgtttgatatgcaaaaaacatccaaatgtacagattatcatgaaattatttgcttttgccatgttgtccttggttccttcagttactgtctgttccgttttttccaaggaagtggatatttattcaggaacatatggaaacgatgatgtggaagtattccagccggaggaagtgatgtatcatctggccggaagggatggcgtcttttatgaaggtgcgtttacgtttgacaattataatccggacaagggcggcgccggaaacaggcagggtgttttctccggctatagtacacatttttccagcacggaaggaacgtctctcggctttcactgcaccgggcttaatcccggaaagaacagttccgcttccaaatcttttatttttgtcatggggccatgggaaagcggggaggagtttgtcgctcctcaggttacttttcagaatttgggcgatttgagcttcattgcggataatatggacatgatcggcattaccgatggcgccacggccggaaccggtggcgggaggtacgggaaagctgatattgtttctttcaacaatgtaggaaatatcgaattccgggggctgaatcatgggggtataggcttcagccgtttgaattccttggcttttaccaataccggggatatttcttttacggatatgaagatgggatattcttccaatggcggtgccatttttattaaccagggggggaattcttccctttactccaatcctggagatgggaatatttcttttgaccatacgggaagtattatcttcaggaatcttgttaaaacttcttattacatgagttctgcggggatttttaccaatgaagggagtatttcatttaatgatacggaaaatatcctgtttgaaaataacacgtccaccggaggacctgcggcgataggcattggatccatattcttaccggataaccagccgtctttgtcgtttagcaacatccggggagatattatttttagaaataataaggcttccggagggagcatgccggggatggcgggcgctatcactatttatggatcttttaagctggtgcaaacgggtgatgtcctgtttgaaaataatgtgactgataaaaatacggccggagccatttattgcggcaataatgaagggaaaaggtttggagggcaatggcttttgtctgcggatggcgggaatatcgttttccgaggcaacttggttaaaggaagttcgggggtctttgcccgcgccctggcgatttttgtttatgctcccgaaaacgattatacgggcatgtctcagcccaatgggaatttaaccatggatttccgcgcccaggccggacgagaaattgtattttatgatagtattgatattgaaagtattactgtagccatgcctaccctgcatattaacagaattccggccgattgggcagattatggaggtattcctgtggagtttggaggaaccgtgcgtttttccggtgcattgacggagtcgtttctagttcgcaatgacggggaaagtgatggtgattacgcggaacgggtggagacctcccgcagggtgaaacttgaatcaaatattattgtggaagggggacggctggttcttgaatacggcatgaacctggcgaatgagagtggggatgtatggcagggaagttcaagagtggagcaggacaaaccggtgtttaacctggccggcggagtgctggaaatgacgtccggttcatccatcagcgcccagcaggtgattgtttccggccatggcagcggcgctatcctgcgggtgggagccgctcccatcggttccgacagttgggaggggaagacctatgaactgccttccctttccgctgtcaccattgacatgtcccacgggtttgactgggatctcatgcctttctcggaacggggggacagcggtatcaacatcaccgcctccggggaatttttactggggggaaccattggaattgcggatacgctggatgattacgcctccgccgcctggggaagggaccgggagtttgtcatttttaatatggattcttccagcaaacggccgcaaggagagctgaaaggggttatttccaatacgacccagtcatccacggttgattctccctatacctacggcggtacctgggaatatgaatggcgcgacatggatggagatggagaagatgaccagctgttggcaatttggaaacatgaagccggatgccgcccggatcaggtccgtccggagcaggctggagagcttgctctcaattccctttggagttccgcttcaaacgcggcttctcttgggaatactgcgttggcgcagttaaccccggtgcggttgtatcagcggtatgcacgcaatgtatggggaatggggctgggggatttcgcccgccagcgttcccggggcggcgtagatggttatgactatgacgggggcggatattccgttggcatggattccgattttggaggaaagagcgggatatgggggatagcgttcggacaaatgcacggtttcagcaggagccgggattttaatgggaggattacccaggattccctgatgggaagcatttattgggggcggatattccgctccggagagcgttccctgtggacggtgaaagccgatcttacttggggaatgactgataactgcatggaaagccggttcagcaacggtatggacgctcatggggaatggaacaacagaacgtggctggtccaggcggaagtttccagaagcattcagtatgcaggaggatggactgtgtctccgtttttgaggatggagtttacacatggcacggaagcttcttttcttgaagacggcagctatgccagaaaatttgaaggagcggttttgcgccggttgtccatcccggcaggtgtgagtgttgagagaagtggtgactggaaaggcaggccctggacgcaggtgctccgcctttcctatgtgggagatgctattcaggatgtgccggaggcttccgtttacagcatatacagcgacattttctggagggaccgtggtgtccaaccagcccgccatgccgtacgcgtggagtatgatgccgccttgcagtggaatgaccgctggacggtttatgccggttatggcatggaagcccggggaagctccgtgtaccaccgcgtaaatgcgggtgtatccagggcgttttaggaaacatcagcacggatagaaaaaagggcacgttttcgaaggaaacgcgcccttttttgatactgcggggggggatgttccggcagggggggacagctacaatgttttgccgttcggccacatcagcatccgtttcaggaagcgttcgttgttgacggtgatcttcgggaagaggcgtttgctggattccttgagcgccctgatggcgtcttcaccctgcagcggcgtgcggccggattcgtcgatgacggtacgcagccatgcggtctgcggcatgccgcatgcttccacggccttgaagggcatgcgttccctccagttggtccctcccgtagtgccgggaatattgagccgtttgttgatgccgaagagagcaggccagagaatggtcgcataacgggaacgggaacggaacagggcgttgtacatggccgtcttgatttcctggttccagtaggaaagacaggtttcaggctgcatgccggagaaatccgcaaaccatttcagaaggcgcgctccgtcctccgcctggcgcacgatgttttcctgttccgggctggacggcgttttgggggagccgttctcccacaggcccagcttgagggcgcgttcgattttcgcgtagctgtcgttccatgtctgcatgatggtttcgaaatcatgcgttccgaacgccgcaaaggagcattcgtgatactcttttccggacgtaatggttccgtccgccttgatttcccagtggggaattttgaaaccggggatatccagctggcgcatgttcgggcgcacgtagtccggaacgcagcccaggtcttcccccaccacgctgacgccgggagcggcggaaagcagaaggcgcaggtacaggtccccatccgccaggttcatgttgcggtccgcagcattgtcatccccgcgcggcttgaagccgggcagccttccgcccgttctctgggccgcctgatcggtggaaagcggcaggaataccccgttttccgtgggtttccacgggaaggagtaaatgcggtaaaagcccaggatgtggtcgatcctgtacatgctgaaaatcttggtgcagtattttacccggcggcgccaccaggcgaagttgtcctgcgccatgacatcccatctatacagcggaatgccccagttttgcccccatttgaccgtgaatgggtcttccgcatagctgccttccgccggggctcctccgcaccattccgtgtcaaacaggtggcgctcaaaaaagacgtcggcgctggaaagggaaacgccaatggggatatcccccatcagcttcacattgcgttcgtccgcataaatacggatgaattcccactgtttttcacagagccactggagccagcgggcaaaatccttttcctcttcgtaatcggaggcaatggccttggcccgcgccggatcctgttccggccagtgccaccagatttccgtaccgaacaggtcgcagagaatctggaaacagacaaagtcttccagccagcttccctgttctttcacccattccctgaatttgggcataatgcactcatattccggcttggttttgaaattgttccaggctccccgcagaatccacattttccagaatctgaccttggggtagtccaccagatccgggccggagggctgttcccacggcagcgtgtcccccgtttcattgaatacgcgttcttccaggccgggtatggtccagggttccagggaaaggtacaggggttccaaagctacggagctgatggcggaatagggggaggggcattcgtccctgcccagggcattgacggggagcagctggaggaaccccacatgggcatccgccgcccagtcaatccattggcgcaaggccgtcaggtccccgattccgtggtcattgttacggcgcagggagaacaatggcagaactacgccggctaatcttttctcatccatatcagaacgcattacttgagcggttcccccggatggacctgcgtcagccgttggaacagtaagctccagaatagcatttccggcaggaaggcggcaagcttaatacgttgtctccgcgctatgctttgcggtttttcctgggaagtggagcagggggacggtaagacaggctgttttttcccgccgcaggaatagacgccttaccgggaatccgattatttgtccgggatgcagttcggaagcggcatggttttctctgcgggaaacagcatgaaccggagggaaaggcggaatttttcttttagaaacagtctctggcggaaacaggcgcaaattctgcttccatccgtaatccccggcaattaagataatctgcaaatgaaattgctttttctcccttccgctttgctggtgctgctggcctcctgcggtccgaacaagcatgtgaatgcctgggaccgtcagagttctgcgttggatcccgtgggaatcacttccaagaaaatggcggctaaaaacaaggcggagcaggcattttacaaacctggggaagccgttacgttcaagaaggacagaatgatggtgtttgaacagaatccggaaagtaatttttccacaagcggaaccgtcaggggtggggtgaaaaccgggaaagtgctggtctgcggggatttgttcgccaaagtcgagtttgaagacggcagccagggttacgtaagcctctcggagattgttaatccgcaggaaatgatgggtttttatcctgtttccgcttctgatttaattggtccggacggagctttgcttcctttgccctcaaacatgggcgccgtcagcccggaagccgccgccgcttcccgtgagctggatatatcccggatgaatacctctctggttcctgttccgaattccgtttctccgtcgggagctgcgtctcaggaagctcctccggaaaacgttcccctgcctgaatccagcgtgaagcagtagggcctttgcagaaaatccggaaagtcgggcggaaaacaggaggcaatatacgtcggcctgcgcttcgcctgtatttttgttcccgggttctttccgacaggaacggaagcaattttattccgccgtcaattcatacgcaacggcatccgttacggtgacagtagcgaattgcccgacgggcagcgtcagaggaacggaaacggtcccgtcaatgtccggagcatcccattccgttctggcgactccgggagcatccaccagcacgcgtatttgcctgccgatttgctcctggcccgtttccgaagcgagacgcgccagcaacagggtggcttcattgtagcggcgagccttggtgcggtggtgcacctgattgggcatcttgtaggcttttgtcccttcctcccgtgagaaggtgaaaatgccggcgcgttcaaaacggaattcctcgataaactccatcagttcctgatggtcgtcttccgtttctccggggaatccggtgatgaaggtggtgcggatggcgatgcccggaacggccttccggatattccggagcaacgtgcggatatagtctccgtccgttacgcgctgcatggcgtccagcatattatcggaaatatgctggaggggaatgtctacatagcgggccactttggggcattccgcgatggccgcggtcagttcgtcgctccagtgggcggggtgggtgtaaagcagcctgatccagaattccccctcaatggcgttcagggcgcggagaagagaagccagggactctccgcgggaggaatccaccgcgctgcggcggttggggcgcgcatccgtccatttatccatgccgtaataggtgatgtcctgcgcgatgaggcagatttccttcacgccggaccggataagggtttccgcttcacgcactacgtcctgctgggaacggctgcggtggcgtccgcggatcatgggtatgatgcagtaggcgcagccgtggttgcagccttccgctatcttgatgtaggccgtgtgcggcggggtaaggcggtagcgcggcgtgttccagtcaggaacgtacctgcattttccttcaatgaagttccggtcctgtatggtccggtccatcacttgagtgatgatttccggcagtttggtgatttggtccggaccgataaaggcgtccacctccggaagcagggcgggcagttccttccggaagcgctgggacaggcagcccgccacgatgagtttctggttttccggataagccccgttttcccgggcgcgcacgatgtccagaatggcatcgatggcttcctgcttggcctggtcaatgaaagcgcaggtattgactaccattacgtccgcaagttccggttccggagtcatggtcatgccggctttttgcaggtggccgatcatgatttcagagtcaaccagattcttgggacagcccagggaaatgagtccaacggtgagaggcatggcagtagataagaagcgtgatggcgtcaatccccggagggggagtcgtccttgacgacgacgaggtcgaatggccggatgtccacgacgcgcacaggggtacccttaatcagtatgccttgtcgagagaaaacctcgcatatttcgccatgaatcatggcttttccgttgggtttcagttccgtgacggcgttcccgcggtctcctacctgaacgcgcgcgatattgaccgcttcaccggcggaacctccgctgaccgtggcgttggtgacacggcgcatcaggatggaatccgggaggtatttcatcagcagggcaatcagaatggagcctccggtcaggcccagggccagtttcaggaggggaatgcccaggactgccgccagcgtgttgacgtcattccactgtccgtcccggatgatatggtcccattcccaggagctgaccatgccgccgaacagggccagaaagatgcagacgccgcccgcaacggcagcaatgaatgtgcccgggataacgaagaattccacgcaaagaaggattatgcccagaacgagcagggccgccgtctcatagccggccagattcccggcaatgttgttgccgaagaagaacagggcaaacgcggcaatggccacaataccgccgatgccgaatcccggcgttttaaattccatgtaaatgccgccgatgcccagcaggatcaggatgggggaagcccacgcaatccagaggccgatgcgctcaaacgccgtaggttccgccgtgactacgggggcatttactttctcctgggtcagcagatccgtgacggaagaggctgtgccctgggccagcaggggcctgccgtcttccagacgcgcggcggcttccttgcccgtcagggtcaggagcgcgcctttttccagtttgacggggccgaactgctggtcctggtcggacgggatcatcatggctttcaccacttccgggcggtaacccttttccgtcacgacggagcgggtaaaggcccagaaggcgctttccgcttttttgcgcatgacggggtccatttcctctccggatgaggtgatgatgcccgctgcgccgatggatgagacgggtgccatgtagattttatcgcacgccgcggagatgagcgccccggcggacatggccctggggtttacgtaggcgtaggtgggaatggtgagcggctggatgcttttcatcatcatttcgctggtttcccaggccaggcccccgggcgtgttcaagtcgaatactactgcgcgagcctgctcctcttgcgccctcttcaggatgcggttcatgaagccgaagctttgtttgctggtcagggagtcttcccctacggggataatgactaccctgtcgcggaaagtgtcctccgcggccgcccggaagggggcgccggcaaacagggccagcagagccagcaacagaaggtggatgcgcttcatgcggacaggctagcatgttccgttcccgcgctcaatggggaaatgtgttcctccggggaggaaagccattggtgctgcgccattttttttctgcctgcggaggcattgtttttccgtgcatgacgttccggttctgtcttcttgtgcacccggcccccttgtgatagactggttccgccttatgggaaggattgatgaagacagcatccggcgcgttctggaggccactgacattgtagatgtagtgggctcctatcttcccctgaaaagggccggttcccggtggaaggcgtgctgcccgttccacaatgaaaagacgccttcctttattgtggaccagagtcggcagaatttcaaatgctttggctgcggggaaggaggatccgccattacttttgtgatgaagatggagaacctggggtttgcggataccgtgcgaaggctggcggaaaaagccggaatctccattgtggaagaggtttatgacgccgcggaagaaaaacggcgcaaggcacgcacggctttgcttgtagcccacaagaaggcagctgttttttttcacaggctcctgctttgttccccgaaggcggcggaggccagggcttacctgaattcccgcggctatggggcagacatggcgaaacgctggcaggtgggatgggctcccgattcctcgcgggagtttctggcctgggcccgcagggaggggattccggaccaggtcctgatagattccggtctcgccaaccgcggagaacggggtgatttgtacgcccgtttccgggacaggctgatgttccccatcaacaatgtgtacggagaatgtgtggcgttttccggccgcattctgcggcctcaggaaaacgcaggcaagtacgttaattccccggagacggccattttcaagaagggggacgtggtgtttgccctggacaaggcgcgcggccctatgggaaaaagcggcaaagccctgttgtgcgaggggcagattgacgtcattgcctgccacgaggcgggtatttcttttgccgtagcccctttggggacggcgtttactccggagcatgcccggattctttcacgttatgcttcacggatagtgttgtgttttgatgcggacaaggcgggcatggctgcagcggatcgggcttttcgtgaactggcccccttcggcaaggatatttacctggtgaaccttcctgccggggacgatcctgattctttcatgaagagggaggggaaagaggctttttctgggatggtggagcgggcccgttccttctttgaggttcgcattgagcgggccagggagggcggtttgttagatgacgccgcttccagcgccgcttttgcccgtgagatgacggtcctgctggcctgcatgagcgatccggtggcccgggacctggctacggctgacatagccacgcgcatgcgcatggctgcagataatttgcgcggcgccgtcagaatggccggacgccggaaggggcaggaacaggcccagtccgcagagcgtaagacggctgcggaggtcccgcggcatcctcccgtgaaaatggatcgcgccgtggccgtgctctgtgaactggcccttcagaattcccgtgcccaggggcttatcgtggaccgtattgaagaattgctggagccgatgcggctgctgcagggcggaggcatcttaaaaaaaattctggccaggctgccttctccggacagccccgcggccgttcaggcttttttggcgtccctgcctcagccggaacgggatgccctgggtatgctgaatctggagcccatacctattcccgatgtggacaggagtgtacaggaagcctgctccggcattgcgaaggccgctttggagaggcacatcgcttccctgatggcggaactggcggatccctccacggatgctgccagaaggctggaattgtccaaacttagtgttgacttgaagcgtttgctgggtacaatgtagtgcctcgatacctccgggtattgatataatggtgaattgtgccctcttcttttcaagatatgtccaaatccggtgacccatccccctcttctcccaagaagacttccgccaacaaaaaagcttctgaatccaaggaaaaaataacggcccggcccgccgcaaaaaattccaaaaccgctccgaaggcggctccagccaaaaaaactccgccagggttgccgctccggctacggaaaaggccgccgccaaacccgttgcggaaaaaaaggccccggcaaaaaaagcgtctccggcttctgcctccaagaaggcggcgccggccgccaaaaagactccggcaaaggcgcctgaagctgttcctgccaagaaagctccagccaaggctgcggagaagaagccggctgagaagaaggctgccaaacctgctgcgaaggaggaaacgcccaaaaagttaagcgaaatattggaagaggaacgcaagagggctgccagccgcaaggtcacgaatccgattgacgctccggagattcaggaaaaaatccgtgaacttatcaagctcgccaaggaacaggggtatctgacttttgacgatattaatgactcccttcccaacgacattgtcgatcagcaggattacgaggccatcatggaccgcctgcgcagcatggcgtttgacatcattgacgcgtctgatgtggacagctacacggaccgcacccgcatcagcacggaagaagaggacgaagaggaaaagctcgaagccaagatggacattctggatgatcccgtccgcatgtacctgaaacaaatgggccaggtttccctgcttacccgtgaagaggaagtggccatttccaagagaattgaggacgcggaacagaacgtccagcgctgtgtgcaccgcttcggtttcatcgcgaatgcctatctggacgtagcctatcgcctgctcgacaatgaggaacgctttgaccgcgttatccttgacaaaaagatagactcccgtgagcgctatatgaaagggctggcccagctctgcgcccagatacagcagacccatcaggacgcatccggttccttccgcaagctgtaccgcagcaaggaggcggccaagtccgtcaaggcccgccaggccgaattcgacaaagttgccggcgttttggtgaagttcttcggtcgcctgtatttcaagcacaaggtgattgaggatttctgttccatgattgacgaggcccgcgaccgcgtgctccgcatgcagaagaaggttgccctggatccggacaacaaggaactcaaggaacatctggcagagctggagcttcgcatgtggatgactgcggatgagatgggagaagcctaccaggaactccgcaaatggcttcgcgaagcccgcagggccaaggatgaaatggtagaggccaacctgcgcctggtcatttccattgccaaaaaatataccaaccgcggcctctccttcctggatctgattcaggaaggcaacatgggcctgatgaaggcggtggaaaaatttgaataccgccgcggctacaaattctccacctatgccacctggtggatccgccaggccatcacccgctccattgcagaccaggcccgcaccatccgcattcccgtgcacatgattgaaaccatcaacaaattgatgcgcgtgcaaaagcagctggtgcaggagtacggtagggaacccactccggaagaaatcgcggaagaaatccatctgcctgtggaacgcgtgcgttccgttttgaaaatggcccagcagcccatttccctgcaagcccccgtgggggattccgacgatacctccttcggtgactttattgaagacaaggcggcggaaaatcccatggaggaagcctccttctctttcctgaaagaaaaaatcaaggatgttctggacaccctcacggaccgtgaacgcgaagttattgaacagcgcttcggcctccgggacggcagtccccgcactctggaggaagtgggccgccagttcagcgtcacccgcgaacgcattcgccagattgaagccaaagccctccgcaagctgcgccatcccacgcgcatcagcaagatcaagggattcctggaaatgacggaatcctgaccggatttgcgccgcatgccgtgctacgcttcgtggtcatgaagacttgcgtagctgcggtatgcggcatgttcatgttactggtttcctgttccggcagcagggaattcaaaccggcgttcaatcagccccttcagcccgtgatgcagccgggctttgtgtatgtggaccaggtggcacccctggtaaagactaatttgaaatatgccggatatgacaattttgtagggcgtccgctggacggttaccacggtcggcgcgccatcctgcgcacccaggcggcgcaggcgttgaaaaaagtctcggaagatttgtatcgtcagggttacctgctggaaatttatgacgcctaccgtccccataccgccgtgctggacatttgcaaatggggagctgacgaaggggaccagaagatgaagtcccggtattatccccatattgacaaggccaaggtgttcggagaccactatgtgcgcgatttctcggaacattcccggggcgtggctgtggatgtttccctgctgtacgccaggaccggaaagccggtggatatgggcggccatcatgacctgctggatcccagttccgccacggactccacattagtgactccgtcccaacgcagaaacaggatgattttgaaaaaggcttttgaaaaacagggttttgccaattatgctccggaatggtggcattaccgcctgttgaatgagcctgaacctaccctgcattattactttcccgcgtgggacggcatgacttccgcaggcaggccataaaagaattttacatatcaaatttttgtaaaaatttgtttgttagttgagtggccgaccccgtgctgattcctatcaagcagaatgtagaagatcgtactgacacctggaaaagatacattagagtagaaaaagcagaacggcattatttcctcatcgacggagacgatgttatgactctccaatggcgcgagtcatctatgcggaagccgatacgaagggtgccgagatgagggcgattgcattggtgatgttgaatcgtctcggcaacacgaaagggaatgcctatcgaaatccattgttgagtatgttgacggaatttggagaaatcaaagacggtaagaatcctaattgggcatctgtaacaaatcagcaatatgccaaggttgaaggggagaagtacagggatattgacaggctgagttgtgaaaaaccggaagaagccagaaaggcgcttcttgaggttctgagcggtggcgtaaccgttccttatgatggatttagaacggcaggcactactcccaagcctcatgttactattggaggaactgactttttgactgaaaaacagtaccggacctgcaccgtcaaaccagacggatgggataatttgtctgtctggcccggtggccctttggatagataaatcattctgaagcatcatcaggcggatcaggtgattgagacttgagccgtctttttgatgaagtaatatccggaagatgaatgcctccttgaaaacgttttttttctcttgctgcacggttccccttgttgtggcttctggtgcgccttctcctcttgtcgatcatcctccggtagatggcgccgccttgcgttttcacaagcaggagatggcttttctggaaaactgtttccgggacaatccggataacaaagtaatctggcaggcggaccatgaagccgctttagtgtggagaacgcctaggggcgccaatttcaacagttatgaatttaaagcttttctgcgccagcaggacggttcatttagagaaataggaagatattctgttatgtccggttatggatattgggatgaaaaaaatatccggttttccaatgaaggttttaagattattttaattgcggatggaggggcaacccgtgcaagccatcagttccattattcccaacctgccgctacctttgttttccggttgggccgggaagagggcaaatgttccagcgaggacgtgaggatgaataatgattgttaatttccaaaccggtttgtccgcaatataggagagggaaagcgcagtttggacaattcctggctattccttgacgaagagtttttttgttgcgggcgtcttggccgtccgtattgggagaccgtgaatacggatttttaattaaaaggccgttccgcggaaacggcggaacggcctgaaaagcgtttatgcgcaggagatgttaatgaggcaggcggaagttgcggttaaacgcggaaacttcttccttaagctgggagaagccgtccggattcgggcatacctggtcacctacgtacaaggccagcgcacgggcaatgaattcggccacctgttccacgtctttttctttcatgccgcgagtggttacggcaggcgtgccgatgcggatgccggagggtttcatgggagagcccgtgtcaaacgggatggcgttcttgtttacggtgatgcctacgcggtccagggcttcctgcgcgtctgcgccgttaatgcccttgttgcggaggtctaccatgaagacgtggttgtccgtaccgttggagacgacgcggaagccgagttctgccattttggccgccatggccttggcgtttttgacaacctgggccgcatagtccttgaattcgggcttcagagcttccccgaaacaggccgccttagcggcaatgatgtgcatgaggggacctccctgcattccggggaagacggcggcatccagttttttggcgtattcctccttgcagatgacgaagccgccgcgggggccgcgcagggatttatgcgtggtggaggagacgaagtccgcatagggaaccggattcgggtgctgcccccctgccaccaggcccgcgatgtgggccatgtccacgaacaggtaggcaccgcaggccctggcaatctgtcccatgcgttcaaagtcgattgtgcgtgagtaggcgcttgctcccgccgtgatcatttgcggctttacctccagagccagtttttccaaagcatcatagtcaatagcttccgtttcctgggatacgccgtagtgaaccacattgtacagtttgccggagaagttggcccggtgaccgtgggtgaggtggccgccgtgggagagatccatcgtgagaatggtgtcgcccggcttcagaacagagaagtaaacggccatgttggcctgggaaccggagtggggctgcacattggcatgatccccgccgaaaatttccagtacgcggtcaatggcgatctgttccactttgtccaccacctcgcagccgccataccagcgtttgccgggatagccttccgcgtatttgttggtcagcagggagccctgggcttcccggacggagggggaagtgaagttttcagaggcaatcagttcaatgttgttgctttcccggcgtccttcttcctgaatgagggccgccagttccggatccgtccattgcagggggctgccggaggatttgacgacgcggcgttcatggcgcccgccttcaaagtcagcatgcagccaggcgtccaggacatcttccacactttcattgtccacataggcggaagccaggcagagcaggttggaatcattgtgctggcgggagagggccgcagcaggggccgtgcggcagagggcggcgcggacgcctacccagcggttggcggcaatgctcatgccgatgccggaccggcagataaggatgccgcggtcgttggtgccgtcagcaatgctgcttgcgactgcattggcatagtcggaataatcacaggaatttttggtcatggttcccatgtcggtcacttcatgaccccatgccttgaggagttctgctacggtttccttgagatcgactccggcgtgatccgcgccgatggcaattttgtatgtcgtattcatggtggtgctcattgctgacgggcaaaaatactgccttatttccctccggctggcaagccccggattcatttcgggctgttcgggaggcacggctcccggaattgcctccgtgaaaaagaaccccggtcccctgaatggggccggggcggcaaggaggttcgcgaggagcgagccgttattttccggaggattccagcttcagcatatcctggacgatgttgatgccttcacggagttccggatcaaggccggaggggtattccggggagtcgtccagttctgccgtggggtcttccgccaggtgcatgaattgttcattgtctttttccggatccgccaggggcagctccttggcgttgacgtcgtccagcgtcaggcggtaaattttgtatttggtagcgtcttccttggccatttccgcgaagcggattttgcgttccttgttgatggatttgcggcgttcttccagggcggagttttcctgttcccggattttcttgttcagggaaagcttgttgtccttgatgcgctgtttcatcatggcgatatcttccctggcaatctggagatcgcggtctttttccacgcgcttcgcgctggcatctttcagcacgggcagcatggccgcgatggaggagtcctttttgtagttggtgcagggcgtaatctggtcatagggcatcgcgtagtccagaatgtcttctcccagctcgaatgccgccgtagcggtgggaagctggatatcgctttccacgcctttgagctgggtggagccgcccgccacacggtaaaatttctgggtagtgactttcagcaggcccgcacggtctctggccgcgaagaaaggcaggtattggccgatgtccacaggctgctgcacagaccccttcccgaaggtggattcatcccccacaatcacggcgcggccgtaatcctgaagggccgcggccagaatttcagaggcggatgcgctgagtttattaatgagcaccacaatggggccattgaagagtttctggcggttgtgagcggatttgatatccacgttgccgcgggtgtccttgatttgcaccacggggccgtttccggtaaagaagcccgtcatcaggcgcacttcctccagggaaccgccgccgttgctgcgcaggtcaattaccaggccatccacattttccttgttcatccgttccaggatttttttgacatccttggcacagcggcggtctccgccttccatgtctgcgtagaaggagggaaggctcagcacgccaatgcggttcctgccttccggagctccggtaagttcaatgatttcacctttggcaagttcatccttcagaggtaccttggagcgggtcagcgtaatgattttggcctgtccgggggcgtctgccggctctactttcaggcgcatctgggtattttcggctccgcggatcatatccaccactttgtccagcttcatgaacaggatatccaccatttctccggagttgtcggagtcaatggcaacgatgcggtcgttcagcttcaattctccggatttgtcagccggtcctcccacaacgataccggtaattttggtggaaccgtcgtcttcactgcccaacagggcgccgatgccggtgagttccgtacccatggagattttgaaacggtccacctggcgcgcacccatgtaatccgtatgcgggtcatacgtcaaggctacggcgctgagcagtgtttccgctacgtcttccagatccgtttcctgaatattgcgctgaatgcgttcataacgcataagcagtttttcctccgctggtttctcattggccaggggatcgggcttgttctgttccttggccaggcgcgctacggtttcacggcgcaggatttcggacaggagctgttcctccaccatgtctttccagacctgctgcatttccgcctcatccttgggccacgcggctgttttgcggcgggaacgttcgatagacttgtctttgtcaaaggtgaagcctccctttttcagcaaatcccgcgcataggagatgcgctgcatggcgcgctggcggtaaagggagtgcatggcctgggccgcatccatcatctggccggacataaggtagtcgtccagctccttaccgtattttcttttgagggcgtctacgtcctgctgggtgaagaatattttgttggggtctaccttgcgcaggtaggtttccaggaatttggcggatagttcatcgctgaattctttgcgggagaagtggaaattctggagcagcagggacatttgcttgcccacctggttgaagtccgtagccgcagaggcgcaggaagtaatggcggctgcggctagggccgagaatgcggtgagtctaatccaacggaatgagtgcatgttcataacggaaaagggtgcgtttttttccatttggggaaaaagctgacgccgggatgtaagtgttactgatttgcaggtgattgtctatcttataaaacgtccacatgacgctattttgctctccttgtttccggaagaggacaagagtaaatggaagccggttcatccggaaatatccggcggcggcagggggaggaaagaagagaattcatgggtggataaatccaccataaagtttgaaattttgtgcggaagtccggcatttgtcatattggagctgcatggaaatggatttcattttacggatgttttttccgctttttgttgttgcgtgctttctttggttttccgttgctgcatccttcccggagagggaaaagtggcgggatgactgctttcctgtttgcagcggagagggtgaggatggggagaacggacgttttccgaagagacgccgcaggaaaggaagcatttcaggattgaggttgcaacggttttctgtacacttcgcgtgatgatgagcataccgaatcgggacaagagtttttccggaagcaagatgggtgttctggtgcagcgttcattcagcaccgtggttttgcttgggttgctggccggggctttgtggtgggactgcgaacttgggtattacggtctggtctgcattttctgtattttggccgcttgggaatggcggcacatgctgctgcgttccggaaaagcctcccagccgaacttgagctttcttttcggagtggcgtaccccgtattgctgtcctggtcatgctgcatcactaaattccgggaaagcgcccttgcggaacaggtttctttcctcatcccccttcctcttctggtggcgcttgccgctccggtcctcctggtagtggttgccttcatccgtgagatgaagtacccggtggatggaagcagggctctccgttccgtgggtactacgctgctttcctttatttatcccgtctggctgttctcttttgccattctggccctgcatctggcgtatatgagggcggggtatgtttatccggccattgtcatgtgtgtgctgtgggtcgttctggtaacgaagatggcggacatttttgcctacgtgagcgggttcctgctgggcggccgccttttttcccgcaggctcattccccacatcagccccaagaaaacgtgggagggcctcctcggttcctgggtgctgacgaatgcggcggccatagggctggttttcccgatgttcggaatttccgtcttgtccataacccaggtattggtactgatgggatgcacatccctcattttcctgctttccgtttacggggatctggccgggtccctggttaaacgcagcctggccatcaaggattccggttccctgctgccggggataggaggaatttttgatttgattgacagcccttcctttaccgtgccgtttttctggtttctgctggcctgcatcggctgaatgtccccggcacgaacggattccctgtaacccgttatggttttttcttctcttcccattgaggaaatccgcggagaattgatggaggctctgcgggttccttctccgcgcattttgttgaaagctcctaccggctccggcaagtccaccggcgttcctccgatgatggatgacgccggtctgggagaccgtggcctgattgtcgttgtacagccccggcggatggccgctcgcctgctggcgcggcatgtggcccggctgcgcggggtggagctgggaaaagaagtggggtatgcggtgcgttttgaacggtacatttcctcccgcacccgtatcgcgtacgtgacggacggcatgttggagcgctggctgacggaacggccctccctggaaggggtgagcgccgtggtgtttgatgagttccatgaacgcagcctttccggggatttatccctggggcgtgtgctggatctgcaggaagggccgcgccgggatctggccgtggtcgtgatgtccgccacactggagatatcagggctgcgggaatatatgggaggttcctgccgggttctggaagcgcaaggcaggcagtatcccgtggaagtcgtttaccgggctccccgcctggtcagtgacggacgcggcagggtggctcctccccccatatgggagcaggcggcggatgttgtgcgggaggcggtgagggaggatgactgcggggatgtgctggtatttatgccgggcgtgtatgagatacggaaaacggtggagttgctggcaggaaagccgtggatgagcggccgggacgtttttcccctttacgggtctctggcgccggagcagcagaattgcgccgtggagcggggggatatcccccgtgtcattgtttccactaatgtggcggaaacttccctgacgattgagggagtgcgtacggtggttgattccgggctggtccgccggtccggatgggatccgtaccgggggatggatacgctgcatctggtgaagatttccaaggcgtccgccgctcagcgcgcgggccgtgccgggcgcgtggctccggggcgctgtttccggctgtggagtgaggcggaacaggcccggaaggaggattttgacccgcccgaatgtttccgggtggatctggccggagccgttttgaatttggctgcctggggcgtcaccgtaccggaaaatttccgttggctggatgttcctgcccccctggtgatgcagcgggccgtgaatttgttggctgccctgggtgcgacggaagaggatggaagcctgacggatacgggaaaaaggatgaccgcttttcccctgccgccccggctggcccgtctgatggtggccggccaagatgaacagtgtgccgtggagctggccgccgttgcagccctgatgcagggagaaggtgttgcggtaaagggggggctgaacgatcatttgcgcgattctgcggattacacggatttccaggcggagtggcgcgcggtggagaaggctgtggatgccggttttggggcggcggcgtgtacccgctggggcatctcttcccgcggggcgcgggaggcatggatggcataccggcagcttctgtccgtcggcagccggggaaaagcccgggaaacgccgggaccggattttacggcggcgcgccctgccgtagtccgtgcaatgattgagagttttgcggaccatgtgggtgtgcgaaatggcgtggcagccaatacatgccgcatggccggcggggtgggcggcaggctggcggaaggaagcgtggtgtttcaaggagagcatttcgtagccgcagaggtggcggaattgtccggaaaggcggtggaaacccgtgtgggacgctgtacgcttattgcgccggaagatttgcgttccatttggccggagcgtttttcctgcggggaggaagctgtcttcgatgccgctttgcggcgcgtgcgtctgcaccggaagctgatgtatggagatctggtgctggaggatcgtgaccgcggggatgcccctacggagctggccgccccggttttggctgaaaaagtagtggacggaaccctgaagctggtgaaatggaatgatgccgtggaacagtggatacgccgtcttaatggtttgagcgtttggatgccggaactggggctgccccggttttcggaggaggacaagctggtcgccatttctctggtctgtgaaggggccgtgggttataaggacatcaaggaaagggaaattattcccgtgctgagggattggctttccggctggcaggcgaaggcgctggacgattatgccccggtaagcctcacgttgcccaacggccagcacgccaaggtcaggtacggggaggattcctccccggtgatcagtctgacggtgcagcgcctgttcggcgtggcggtttccccacgcattgccaacggggccgtacccgtgattgtggaggtgctggcccccagccagaggccgtggcaggtaacgggatctctggaaagtttttggcggaacggatacgggcaaatgaaaaaggacctggcggggcgttatccccggcaccgttggcccgaccccggggaactggatttccttccccgttcccggtgataaggagaaaggatttttctgtaacaaaacagtagcaaaatcgaccgtttccgtgtaaagaggcggtggtgcagctcgcggatgccctccgcccaccattcacaagagacagttatggactcaatttactggattatcatcacagccctgctgcttctggcggcatttgacttgatcaacggcgtagcgaatgacgccgtcaacttcctcaattccgccatcggttccaaggctgcacccgtgcgggtgatcctgaccgtagcttccatcggcgtgctggtgggggcctgtttctccggaggcatgatggaagtagcccgcaacggcatttttcacccggacatgttcagttatcatgaagtgatgctgcttttcctgggggtaatgatcagcgaagtgattctgctggataccttcaatacgttcggattgcctacgtccaccaccgtttccctggtattcggtattttggggtctgccgtagcgacggccctgttcaagatttccaagctccgcctggttcagtccgtgtgggatttcattaatacggacaaggcttttgagattgtcaccagcattcttctttccgtagccatcgcctttacggtgggcaccatcgtcatgtggatttcccgtctggcgttcacgtttaaataccagtcccggttcaaatggttcggctgcttctggtgcggcattgccatgacggcgatagcctattttgccgttttcaagggcttgaaggagtctaccctgatggagccctcgttcatccaatacattgaccagaatctgggcatggccctgctcacggccttcggcggtttttccgtgctcatgttcctgcttcagcatttgttcatgacgaatattctgcgcctgaccgttctggcgggcactttttccctggctctggcctttgcgggcaacgacctggtgaatttcatcggcgttttcatgggtggtctggattccttccagtacgccagcggcgtggcggcggccggtggctctccctcatccatcacctccatggagtgtctgatgccggggcagggcatgccggtaaaccattatattttgttcgccgcgggctgtatgatgatttttgccttgtggttctccaaaaaggcaaaaacggtgatcgccaccggcgtggaactttccaggcagggtgaaggcggtattgagcgtttcggctccgtcccccccgcccgcgccatcgttcgcagcgccatcgccctgggacgcggggtgaaaaggcttattcccgcccgcatgctggtgcgcatgaaccaccagtgggatcccgccccccagcccttgaatcccaaggaccgggtggcatttgacctgattcgcgccacggtgaacctgacggttgcttccctgttgattgcatgggctactggcaggcagctccctctttccaccacgtacgtgacgttcatggtggcgatgggctcctccctggcggacaaggcatggggaagggagagcgcggtttaccgtgtaaccggcgtgctgacggtgatttccggctggttcatgaccgggctggctgcctttacgctggccgccgtcatggctaccatcctgcattacggacaggtgtacgccatcttcggtctgctggccctggtggttgtcattctggtaaagtccaccatcatgcaccgcaagcgggaaagcaagctttccgtagagcgttttgaccagattacggaagaaaatatcctggatgtatgcagccaccagattgtggacagcacgctcaagctgcgggaaatttacaatgacaccgtggaaaactttttccagggggacaggaaggccctgaaagaactggcggatgccgcagaacggctggccatgaccagcagcgaacatcacaagtacgatattctccctattctgtacaagatgcagtcccgttccctggatatgggctaccactttgtgcaggccctggagcatctgaatgaagctacgcagagcctgtcgcagttttccgagtccatcttcacgtatgtggataataaccacacgccgtttacgattgaccaggtggacgatttgaaggaggtgcataccgccctcatcaagctgctggatgaatattgcaaaatgctccagacggggacgtacattcagttcgactatacgatggtggcccaggaacagcttcttcaactggtggcaaaggccaccaagcgccagatcaagcgggcccagcgcaaccagacgcgcacccgttcctccctgctttatctgaacatgcttaatgaaatgaggtttatggccgtgcaggtgcgggccctgaccaatgacgaacgaaactttgtagcagcctgaagcggcggttctctgtttttttcacgtaaggaaaaaaattcttgagcgtttaattcgtgaaggtatcctgaatgaacagggatgttcgataagggaggaacgagagcttcccttgtcaccaggaataaccctgatttcataggtagttagttggagcggctacgggagaaattccgtagccgcttttttgtcttcccgggccttgtgtcatacaaaagaaataatgtttgaacatatttgccgtgcgtttgtctcacccataacggttatgatccggatgcagtgaaagagagagcgcttcatccacttaaggactcgaccgtcttcataggtagttagttgaacagcagccccggcgaagggattcgccggggtttgttcatttccggaagatgtattccgcgctgtaaacagctggaagggaggggaaaagaaaaaataggctgcgttttgccacggggtttgattgacgtgtgggatgcgtcagggcatagtggcagggtatgaagagagcgttttgcgtgatagccggtgcatgcagcctgcttggatgggctccggcggacgagacgggcatgaacaatgtgctggaggattggcggatgaggcagtccgactgggaatccgcattgaaaacggctgaaagcggggaaaaaagggcggaattgatgaaaaaccgtccagatgccgttccggtggctcgggaattatggaggctggtagggcgcgaccttcagaaacccgagactcaaaaatcctgccttcttccggctgtcgtctggtttctggatcatccccaggctgtagcgcaggcgttccccaatggagacatggccaggaaaattgtcgtgttctgcctggattccctggaaaatacgctgttccgggaacagggggcgggaaaggcggcgtatgccctgagcaattcccgtgacctgcgctgccgcgttattctggaacagatcaaggattacaaccagttccctgaggaccagggcctggcttccctgggcctggccatggtgatgaaggaaacgacagggatgcttcaggatgacgtcaggctggtggcggcccgcggaaaattgctgaaagacgccattatcaaatgctatgattccagtttcggccctattccggttcaaaatattgtgaaggaggaactgtatgaaatacgcaatctcaatatcgggcagaccgggcctgaaatcagccttccctctaccgcggcggccggaaaagtgacgctcccctccgggaataagcccgtgctggtggttttttgggatccgcaggatatgcgttccgttcagtttttgcaaaaagccgcgtctctccggaaagaatttcccggtttgacggtgatgccggtggctcccggaaagagagagaacatagaaaaggccctattgaacttgaaaatggatatgccctccctggtggatgaaaaagcggtggcgtttaaggattaccgggtaaggctcaccccgcgggtgtatctgctggaccctgcggggaaaatcctgatgcgcggcacgccggatatgctgtttgacgccaacctgtacgcggtcatgggcaaacttgagggaaaaaagaaagaaaagccggatgggaaaaagtctccctcctcccctgcttcctccaagcctgtttctccgccggccaggattaattccccggatacgcgcgttccctctgtttcccggcctgataggccgcggcccgcgttcccttccgccccctccggtgcggaggaccattctctttccgctcctcctttgaggcccatgcctgaatgatccgtttcatggaggggattctgttgagaaaggccgcggaggacgtggcccgggttctttccggagcaggacacaccgtatattttgtgggcggctgtgttcgggacagattgctgggatattccgtgaaggatatcgatattgctacttccgcccgcccggatgaagtgttgcgcctgtttccggatgcctgggaagtgggcgccgccttcggcgtgatgctggtacgccgcgaaggtttttcctttgaggtggcgaccttccgcagagacggaagctacagggatggccggaggccggaggccgtctgtttcacggatgcggaagaagatgcccggcggcgtgattttaccatgaacggcctctttgaagatccgttttctttgcctccgggccgtgtggtggattatgtaggcggagtggaggatatccgggcccgcgtattgaggtgcatcggggagccggaccgtcgttttgaagaagattccctgcggctgatgcgcgccgtacgttttgccgttaccagggaagttcaggtggagaaggagacttgctcctccattttcaggaacgctccgctgctggcccggatttccccggaacgcatccgggaggaactggacaggattttattgtctcccggaaggaaacggggtgtggaaatgctggtggaaacggggttgatgaagcatgtcattccggaaatatacgatatgataggctgtacgcaacctccccaatggcatccggaaggagacgtatacacccatacgctgatgatgctggatgcgctgggaagggacggctcccccgtgtctttggagctggccctgggggttctgctgcatgacatcgggaaacctccctgccgtcaggtggatgaaacggggcgcatccgtttttccggtcatgacaaggaaggctcttccatggccagggtcattttaagaaggctgaaatattccaatgccgtggtggatgcggtgtgttccatggtggagcgccatatgcgcttcatcaacgtgaggcagatgaggaaatctacgctgcgaatgttcatgaacgctcctcatttccgggatgaactggaactccaccgcctggattgcctttcctccaacggactgatggacaactggcaatttgtcagggacttcatggattcctaccggaatgcccctctggtgcctcctcctctggtgaccgggcgtgatctggtgaatctggggctgtccccggggcctgatttcgggaaatggctgtcccgtctgcaggagcttcagttggagggaacgctccggaccagggaggaagccctgctgcagctggaacaaattgccccggtggaacagaatgcgcttgcagaatacctgaaaaagttagcattataagcgtcaaaatttgattatttcaactcatgcgtcctgtcatttatcaactatttgttcgtcatttttccaatatggagacccatggagttgactgggggagccgggaaacgaacgggtgcggaacttttaatggagtgacggataaagccttacgtgaaatagcacggatgggtttcacacacatctggctgaccggggtgctgaggcacgctacgcagacgtcccatcccgggctagccgcccagccgaaatccatcgtaaaaggcctggcaggaagtccctatgccgtggtggattattttgacgtggatccggatctggcctcctccccggagaagagaatggatgagttcaaggctctggtaaagcgttgccggacggtggggctgctgccgatgatggattttattcccaaccatgtttcccgagcctacctggcggactgggacgggcatgacgattttggagaaggagatgatccccatacgtttttttctccggagcaggggtacttttacctgacctccaacagccctggggacggtccacccctgcgtctgccggacggcctgtttgaaggggaaatgacgttcggacgtgtgacgggcaacaatgccgttacatggaatcccggcaagtacgactggtatgaaacggtcaagctcaactacggctataactttatggccggtcttcctgccctccgcctgttgccggggtggaccagccccaagcagcatgtgcccaagacatggcgcatcatggacgatatcctttccttctggcaaagcctgggcatcggcggtttcaggtgcgacatggcccaaatgatccccatggctttctggaaatgggccatttcccgttcccgggtgcgtctgccggacgtgtttttcatggcggaggcatacaacgaccacatgaaaaccacacccggcgatccgtgcgccgcccttctggatgccggatttaatgccgtttacgattccgactgctatcatctggcgctccatatgtacacggaaaataactgggccaatgacttcgaccggcttttccgaagcaatcccatatacatgacccacggcgtccgctacgtggaaaaccatgatgaaacgcgcgtgtgctcccctctttcctggggcggcgtgggacgcgttgttctgccggcggtcatgacgctggtgtatgcctccgggagcggtcccgtgctggtgtacaacgggcaggaagtgggggaacgggcggaggggcccggcggtttcggcggacatgacggacgtaccagtatttttgactatacctgcctcccccggctccagccctgggtggcgaatggccggtttgactcttccctgttgccggaagagtccgcagaactgagaaattttcatcggaagcttcttcctctgatgcagcatccggcgctggaccggggagatttttacggcctgaactgggctaatatgaaaaacaccactttcggcagggaaccggcggaagacacttccggccactgggtatatgccatgctccggcatgatgcccgcgccagggccaccgtgcttgtggtggggaacctttctccaaatatcaatttctacaacctgcgcatttccattccccagcacgctttcggctggtgcggcatccagacggatcgggtacgcgtcagaaacctgatggacgccgagggtgaggacaggatttttgagcggcgggaattgatggactgcggtctgtcccatcccctgaaaccgggacatgtgggcgtgctggaactgtctgccgtttagagaagcgttccctccggagggaagctgcagcctttgccgatattttttactctgctgggcgtttttatgatgacgggcggtttttaattcggtatagtcccggaaattcctatgactagacgtttccctcactccatgtctgccattcagcaaattgccatggcgcttgccgttgccggtattggagccggccaggggctggcccaggagggggcaggggccgcacgccgggcagcagcccggatggaagagcaggctcaggcttccatgctgctgttagggcaggcgcgtcagcaatattccgagggcaagtaccaggaagctctggacaattaccgcagaagcctgactgcgctgcccaaatcccccaatatggagaagcgccgccgtttcctggaaaccagcatcgcggatgccagtgtggctgtggctcaggaatatatcaaggcggggcgttacgatgaggccgtcaagttgctggaagatgccctgaaatccactccggaccatgccttggccaggcgcacgttggaaatagcccgcgacccggtgcgtacgaatccggcattgtctccggaacacgtaaaaaatgtagaggaagtcaaccgtctgcttcacctggctttcggctattatgaactgggccagtatgatgcggccctgaaggaatttacgtccgtccttaagacggacccttacaatacggcggcgcggcgcggcatggaactggttaaccgcgccagaaccgcctattttagcgctgccagggatgaaacccgcagcagtgccctggcggatgtttccagacagtgggagatgcccgttcctttgacggaaacaccggaggaacccgcttcattttcccggccgctggataacccggtggtgaatgtggaccagaaactgggcatgatccgcctgccccgtgtgcagctggatggagcgacggtgcaggaagccgtggactatctgcgcagccaggccaggacgcatgatgccacggccatgactgcggcggaacgcggcgtgaatatttccgtggatcccggtcctgcagacagcgtttccgccagggacgccgccgccaagagaattacgcttaatcttcagaatgtacctcttcgtgaggccctggaatacgtggcgcgcgcatccggccttattctgcggacaaatgcctttggtgcggaactggtatccagttcagacggaacttcctacatggtcaccaagtccattacccttccgccgggcttcttttccggattgtcggaggactctggcgccgaaaattcagaccccttcagttccggtgattccggttcttccggcatgaccctgaaacgggtggatccgcaaaaggcgctggcttccatgggggtgaaattcccggaaggcagtttcattaaatacaactcgggcaactccactcttcttttccatggcacgcccagagatttgagcatgctggaggagctggtagcggccaggactgcggaacagcccctccaggtggtggtcagcgcgacctttctggaagtcaatcagacggacttggaggaattgggctttaactggatcgtcaatctgaacctggaccctaccaagtggttcatgggcggcgcgggaaccgataaaaatgactataacaattccgtgctggacagtgccgccaatgtggccggggccgtcgctcccgcaggagtggtgggcgggctgcgttccggcaaccaggtttttacggaagatagcattgacagcatgatagaacgcggcacttccgccagaagttctgatgcgacctatgttcccggcggcgctcccagcatcgtcactttgcgcggcatgtggagtcacgcggatatcacgatgattatgcgcggcctgagccagaaaaaaggcacagacattatgcagcatccttccgtgattgtgcgccccggtgaaaaagccacctttttcagcggcagggaactgatttaccctacggaatatgatccgcctgaagttcccaacagcacgggcaataataatgactggggcgacaatgacaataacggcggcggtattccggtcatgcccatgactcccgcccatcccactgcctttgaaaccaggcagctcggcacgatcttcaatgtggaagtgaccggcatcagcgatgacaaatccatcgtggaaatgaccgtagtgccggaaatcgtggattttgacggtttcatcaattacggtacgtcgcttttcgttcccatggtctcccaggaaaaggacgcaaaggaagatgtcgtcatggtgaaaacttcagacaacttcatccttcagcccgtgttttccacgcggcgcctgaccgctccggtgcgcatagccaccggcaatacgctcgtcatcggcgccttgaaaaaatccacttccattacgtatgaggataaaattcccgttctgggggatattccctgggtggggcgccttttccgttccaaggggtccaaggaacagcgcaaggccatcatcatcatggtaaaggcggaagtggtggatccgggcggcaaaaagctttatacgccggatacttccattccggacgaggaggtcccggcaggggacgcttctctccccgccctcagcaatgcccagtaacctttaaccggatcaagaccattgaaaaacagcggttccgattttgagtcttctccttcccagggggctgataatatcatgcgtcagctgcatgcgtcggattcccacggagtagaacggagaagggaagtagtagtgcgcccggacggcagcaaggtgatccgggtggaaaagcgccggcggacttacagtgacgatcagcgggacgccaaacagggccatgttgaaaaacaagcgttttttaataggcctttgcattctggttctgctggctgccggtgcgctggcggggacgtatatgtaccgccttacttctttcaatacggaggaatttgccggccgtctgcaagctgatctttccgccgcctggggcggagatgtgaaaatttccggaatggcggtggatggccttaccatgaaggcttcacgcatcaaggtatcctttccggaagattcctgcctgtcctttgtggcgatggaaggcatctccggggaaatttccgccgtgcccttattcatggggaaaatcaagggggaaagccttaatgtgtccagggcggtagttggtttgcggcccggattcgttaaatttgccgtaccgcagacgaaacgggaattgccgttcgttttccggcgatacacagcgccacgtctggaagtggggtatgcccatgggacggaagaatttactctggagaggaatggcgctcccttttatatgacggcggaagcctacatccgcacgtccgggaacggacctgaaccggaatacgtgctggatctgtcacagcaaaaattgaaaatcaagggctggccgctgatgggggttgattccggttccgtcattctaaacgggagcggcgtcaagcagctcactttttccggttttctggacaaagggcgcctgctcaataagcctacggatctcagccccttcatgattacggggaattttcttctgggtacggatttccgtcaccaggcgtggactttgacaggaaaaaatttcgatctcgcttccctgctgggagatgatttctcttcccttctcaaggtgcagacgggagaacaggaaggggatgaaaagcatgaattgaagctggattttgctttgcctgtaacaactgaacagaagaggccctccctaaaaggatacagtggttccgttatcaaggcgaccatgatcaggctgcctgttttgcgcctgctggcggccatggctgcccggaatacggaaataaggctgccgtactcttctcccgtctttacgtccggttctttcctgctggaaagcgatggaacgggtcgttccgcctccctgaaggaaatttccctgtttgaacagagctttctgggagtgaccgggggggtgtacagcaacggtacttccttgacggggaagctggtttttaaaattccttcctacatggtggacagccggaaactgccttccggcgtgacgcaggaagggcatgaaattattcttcctgtgaaaatttccggtactccggagtctccacaggacaactctgccggaatgttccaggaagaggcgccgcgcacgggccgcccggaaatgcataccgctccttcccgtggaatagctcttccagctccgtcaaattcctctcctccccgtattacggtagacggattcatgtgatattgccaggactccatgctgctgctcaatcctattgttcggaaaacatctgaaaagcgttcccgctggtggaccaggctggccggatttggcctgtggtccgtactccagcccatttgcatgagcctgaatatccgttccatcaaggaggagcatgatgatgtttatacggtgccttttctggtagccctttggcacaaccgcacgatggttccgggttatgcgtggtccctggcccagaagccgctcaagatgagtgtgcttaccagcgccagcaaggacggcgccctggtggaggccgtatgcaggcattttggcctgggtgccgtccggggatcttccggacggcggggggctctggcctacatggaaatgatgcgaaaggtccaggagggggacgtctgcttctgttttactccggatggtccgcgaggccctatttacgaagtgcaccacggtattgtcaaactggcctcccagtcagggctgcccatcgttcccgtatgcatcgaatatgaaagctgctggcgtttgaacaagacctgggaccgctatgccattcccaaaccgtgttccaacgtaaatattctatggaaaaagcgcctgttcattcctccggacgcgacggatgaacaggtggcggattatgcccgtcttctggccgggctgcttggcgaggggcttccggacttcccgcctcttaaccaatcattattatgcaaatcatcgatggaaaacaagtagcttcccaggtgctggaagaggttgaaagggatattgcccggctcagggaacagggaataacgcccggtttggccgtggttctggtaggggaagatcccgcttcccaggtatatgtaaattccaaggtgaaaaagtgtgcggagctggggatgaattcccgtaaaatagttctcccttccgacgcctcccaggaagaactgctccggattgtccgtgaattgaacgtggatcctgccgtccacggcatactggtgcaaagcccgcctcctccccatatcgacgaggcggccgtggtcctggaaatagaccctgccaaggatgtggacggcttccatccggagaatgtcgccaagctggtgctggaagatgagaccggttttgtgccctgtacccctctgggctgtatgaggctgttaaaggccgccggcattgaaacggcgggagcgaatgccgtggtcattggccgcagcatgattgtgggcaaaccgatggcgcatcttttgatgtccaaacaggcaaacgctaccgtaaccgtggctcattcccgtacgaaaaacctgccggaactttgccgttccgctgatatcatcgtggcagccataggccggcccgcttttgtgacggctgattttgtgaaagacggcgccgtagtggtggatgtgggcatcaaccgcgtggaagatgcctccgccaagcgcggctaccggattgtgggagacgtagcctatgacgaggtggctcccaagtgccgggccattactcccgtgcccggcggcgtggggccgatgactatcgccatgttgatggctaatacggtcaaagcgtgccgccagcagacgggagcctgatgaaaatgccgtgacgtccgtttttcttgtcaaatgaaggaaagtagggcagtattcagttaccattatgtcaagtaaattactcgaaggcaaagttggtgtcgtagtcggcgtagcgaacaagcgcagcatcgcgttcgcaattgccaaggcgtggcatgaagcgggcgcaaagctcatcttcaattatcagggagaacgtctcaaagacggagttctcaagctgatccatgagaacttcggcgaggatgttcccgtttatgatctggatgtcagcagtgatgaatctgttaacgctttctttgaaagggtccgccagcatacggacaaagtagattgtctgctgcattccgtggcttttgccccgaaggaggctcttggcggcagtttcctggaaacgggccgcgaggcgttcaagatttctctggatatctccgcttattccctggtagctctttcccgcgccgtggaacccatgatgtccgacaacggcagcattttggcgatgtcctatctgggatccgaaaaagtggttcctaactacaatctgatgggagtttccaaagctgccctggaagcctgcacccgttatctggcttatgatttgggccgttcccgcggtatccgtgtcaattgcatcagtgcaggtcccatgcagacgcttgctgctcgcggtgtttccggttttaacaccatgttcaaggtgtatgaggagcatgcccctctgggccgttcctgcacgggtgaggaattgggagccaccggcgttttcctggccagtgacggcgcagccgcaatcaccgggcaggtgatttacgtggacggcggttatcagatcatgggaatgtaatgcgttccttgcggaagctttcttcctgttcacaagccgtaccggtttttccggtacggcttgtttacggtttcatggagaaggtaagggagctgggggcttcctggcttctgtcggaaaggcctgtttccccgctgcgtttcaggggacgaacactttcagcgagccggggcgggtgatgcggaccggagcgtttcctgcataatcgccgtccagttcgcaggaggcctgttcggcggaggtgacggtcccccccgtcatccggatgtattcaaaactgccgctcctccgggaatgaaagcccccttggactgcggccatcaggaattccccgatgatggaagtaatggaatgcctgaatactactgcgtccagaaggccgtcactgttgtccgcttcagcaaagaagttaagcggcccgccatacttgcgtccattgccgaagatgatggaacggccttccaatacccggccttcatctgtggtcagggtgaggtgcggctgtttttccgtacagacgcgggcgccggcaattacataggcaagggctttccatttttttttcatttcccatgtggtcagttctacggctcgggcatccgcgccaatgcccgccatttggagaaaaacttgcccgttgaatgcgaacaggtccacatttttggaacgccccgtgttcagaatgtgcagggcgtggtcgaaatccgggcggattcctatttcccgtgaaaaaacattcatggtacccgcagggaagggggccagcaccgtttccgtattgcagagagcccttgccgcgattcccagcgtgccgtccccgcctgccacagcaacggcaggcgctccggaattagcctgagaaaccaaatggttcaacatgtcttccctgctttccggttcaatgacgtcaaaaaaatcccggtgccgatccagccagcggcggaatcgtccgactctggcgctgcgcgccgtgttattgaaaaacaggggaattttcatggagcggacacgaagaagttcaaaatctgaaccggggcttccgtgtgtgccacaggttcatggcgcacggttccgtcaggcagcttgaactccagcatgccgcgggaaatattgtccggcaggagtacctcaagaaacttcctcatgtcgtcggacggtccgggtgtaatgccttctgccagaactttcccttcttccgatttgaggacgacgtgcaagggaagccttctggcaccgttttttctctcttccctgatgtccagcatcagccggctgccgggcacatattccggttgggccgccacccattcattcgccagtttcatgtagcggtccgtgatattgacggcggggacggtacggctttccggagggaaagccagcgcgtgccgtttttcgtcgtagcgggcttcccatatcataggaaaaaaggctcctgaaggttcttttttccaggaggtggcataaatggcgttctccggtttgcggggatccagcatgctgatggcggacatcacccacggggtgttgaagtccttttcattgtattccagcattttccattctccgtcacaccaggcttccacccagttgtggttgccgcgcacgtggttccaggtaagaacgcccgccatgcgggccggaatgcccacggagcgaagagcgcagattagcaggatgctttggcccgtacaggagaccttgccggattgcagggattccttgactccctggtggggaactcttctctccgtggaatagcgtacattcagggttttctggatgagggaggcgatggcgagggcggcttcccgccccgtcttgcatggggaaacaagcggtgcgaagaggtgatggaactgctccctccattcgtctcgcggttcgttgaccacggcataagggagaacattattttcataaagttcccacggaacctgggcagcccaggggaattggctccgtgcagccagggcgaggcggacttcccggaccagcctttcttgcgtaaccgttcccctgtcctgcgcgggcatgtgggcacgcagaaactccaccccgtcctgaatggcgtcatgggcggcgcaaatagcggcggtcaggcccgggagaagggcgaaaggcagcagattcatgaacgttgaaattcatacctgaatcccgggagggagacaagcttcctcttgcgcaagaagggtatggaaatgggcaaagagatgcgtgtcttccggcggagtgggggcaaagggtgcgtcgttatccagaatatcctcgcaaatgcgcatgaaatcgcgggcggttttcgcccttttcatgtaatggtcaaaagtgtcgggaagtccccgagcggtataaaccagatattttttcatgcggtggatgtgtttttcctccacataatgttcctgcatttcccgcgtgcgttcataaaggcggcgaatatagtgcagcacgttccggaaagtaaggtctgctgcaggatggccctgaaagcgggaatgaagctgtgaaaatatccagggattgcgcagggctgcccgtccaatcatcagcccagctggccgggccagccgcacccatgcctccgctgtggctgcatccacaatatttccgttggcgactactgggcatttcagcattcctgcggcccatttcacccattccgggtgtaccggggagcggtagccctcacggacggtgcgggcgtggatgcacaccctgtccggggaatgggaggcaattaccggaagaatccgttcaaactcgtccggcgtttcgtatcccaggcggcatttgacggtgaaggctccggggggcaatacgtcccgaagcgctcccagggccgcgtccatggccttcagggaccgcagcatgcctccgcccgcatttctccggcatacgatgggagcggggcagcccatgttcagatccacgcctgcacaggcgtgttccatcaggacctgcgcatcccttgccaggtattccggttcatggcccacgagctgtccgtaaatggggcggcctgtaggattttcatcaatggagcgcagaatgtatggcgacatctttttatgatgggccaccgtccggaaatactccgtgatgaaataatccggcagggaattcaagtccttcaatgtgttgaggaaagccagatccgtcacatctttcatgggggccagggccaggagcatgggtctgtgcataccgtgaaaagctccggttggcaagctgtgattgtcttgacgaaagaaggaaagtgtggaagctgggagcatgaatcaggactcaacccgcaaagccagagtgaatgtgagacgggccgaagtaatggagcaggtggaaaaggaaatccagcagcattaccagagtgaattgatttcccacatccgttctgcgggcaatgtgtacaatctgggccatacggaattttttctcgcccgggagttcgggttctgcaacggcgtacgccgtgctattgatatagcatatgcagcacgcagagtgtttcctgaccggcggatttttctgatcggggacattattcacaatccggaggtgaaccggcagctggaggagatgggtattcgaaaactcccctggaagcagttggattcctcctatgaccggattgctccggatgatgtggtgattattcccgcgttcggtgttcccactcctttcatggatgcgctggaggagaagggcgtgcagattgtggatacgacatgcggggacgtgatgaaggtttggaaaagagtaaagaattacgctgccatggggattacctccattatccacggtaaggctacccatgaggaaaccagcgctacggcttcccgggctcttggggaacggggaaggggaaaatacctggtggtttacgatttggaggatgcccgtatcctgtgcgactacatcatgggccgcggagaccgcgaggcattcctgaaacggtttgaaggatgctgttccccgggattcgatcccgaccgggatctggaggaggttggcatcgccaaccagaccaccatgttgaaaacggagacgcagacgctccagaagatggtgaaggatgccattgttcagagggacggggacgatgataatttttatgtgtttgacaccatttgcggtgctacccaggatcgccaggatgccctgtatgaactgctgaaaaatcctctggacgtcatgtttgtggtgggtggctacaacagttccaacacaacgcatctggtggatattgccagggagcatgtgcccacgtacttcattgagtccgcagaatgcatcaagtccatccagtatgtggatgcttttgatacgaagacgcgggaagtgcgccgcatgactacggaaccggtagtgcagaacctgggcaaatccctgaaggtgggaattacggcgggcgcctcatgcccggccaacctgattgaggccaccatcctccgcattgcggatctgcgcaagtagcaaaacgcctccggtttggtgaatgagaaaaaaagagttctctttcaacggcggcacggctgttttttccgtaacacggcgcagtagtctgggccgcggaagaaagcatagggaaaactgcgcgggagtgtttcctaaatttccaaatcttccggtgtaacggaacgttgttcccgggatgcaagcagtacggcttgttccacgacatattccgtattggagtcaaaacggtaggcgttgcagttgggacacactgccgtagtcagggatacgatggaaccgcaggcttcgcaaaccttgaagtccccgggacggtcaataatcagtttagctttatccaggcgggattgctgcatgggagtagaaaataaaacaagccgctcagcagaacagagcggcttgccataaagaatcgtcagaaaaccgaagtgaaaactcaggcgatttttgcgatggccttggcggccttgctcttgtagttggctgcacgattggcggggatggtgccaaccttggcggctttgtcaacggctgaggagaaagtgttgtaggcagcagcagcggcttccttgtcggacgtttccaccgcagcggcaactttcttgcggagggtcttcaacttggaggtcacggcgcggttgcgggcggtgcgggttgctgtctggcggatgcgcttgagtgcggatttggtattggccatgtttaaaaaaggttcggtttccgtttcgaggtggcaaaaacattagaataacaggacaaaatgtcaagctcttgatgtattttttaaggcattcctttcctgcacgggctgactgcgggctttaccggaaaaggagtttgtggcactatattctcccgttatgaagaaacgcgtggatttgcctgaaaaaaaatatgaaggatatatttttgatttggacggcaccctggtggacagcatgccgctccattacagggcatggcgtgaagccctggctcgagcgggggctccggaccatgtgttccggacggatgaattttattcctgcggcggaaaatccgccaatgatgtggtgcgttttttaaatgaacggtacggcatgcacatggatgcggagtccacagctgcggacaagcgccgcatttatttggaaatgctggaaaaggaaggcatgcagcctatccaggaagtggtggaattcgtgcattccctgggagacgcccccaaggcgatagctaccgggagcgccatgccgggagcgtcccggactctggctgctgccggactttcaggcctttttgatgtgattttgacgccggatgaggtggagcatggcaaacctgctccggacatgtttttgaaggcggcggaactcctgggggcatccccggaccgttgcgtggtttttgaggatgccgaacccggcatgaaagctgccgcggccgcaggaatggactgtgtacaggtccggcggccatccctggcctgattcctctttccagatttggtacggaaggggattccgggattttcctcctttcttcatgcccttcttccttttaaggaaaaggcttcacattgcgcccggaatgcgctagaaccttttttcctattgaacaaataaaatattatttgcacatgagcacaaacgacaaaacaccatccgccccgacgaaaacccgcatgacaggagctgaagtgctcgtggaatgcctcgtgcgtgaaggtgtagacgtcgtctttgcctatcctggcggcgccagcatgccgattcatcaggccctgagccatcagcccaaaatacggaccatcctgccccgccatgaacagggaggggcattcggtgcggaaggctatggccgcgttacgggcaaggtgggcgtttgcatttccacctccggccccggcgccaccaacatgattacctccattgcggatgcttatctggactccacgcctctggtggcgattacggctcaggtcatgcgctccttgattggacgcggcgccttccaggaaacggacgtattcggcatgaccgcccctatcgtgaagcacagctatctggtgacggaaccggaagaactgccccgcatcatcaaggaagccttctacatcgcctctacgggccgtccgggccctgtgctgattgacatgcccaaggacgtgcaggaggccgtgtttacaccggactttgacatggagatggatattcccggctacaaccccgtgttgcccgtccctgcggacaagctggaagaactcatcccgttgattgaagacgccaggcggcctgtcatttacgccggcggcggcatcatttctgcggaagcttccggggagcttctggaatttgcggaacgttcccagattcctgtagcgaccaccctgatgggcattggcgccatgccggaaacccaccctctttccctgcgttggctaggcatgcacggagctgtgtttgcgaataacgccgtaaatgaagcggatctggtcattgccctgggcgcccggtttgacgaccgcgtgacaggcgccgtcaatatgttctgcccggaatccacgatcgttcacattgacattgacgccagcgagatcaataaaaacaagaaggtggcgtatcccatccgcgcgaacgtgaaggatgccctccaggtgctcaactccgctctggccgcaaaaggctgggaacgcagatcttccggcttcacccgcacgccggaatggtttggcgtgattgacggctggaaaaaacagtaccccttctcctatgaagaccgcaagggatatatcgccccgcaggccgtcattgaggagctctaccgccagacggcagacaaggatcccatcatctgcacgggggtgggccagcatcagatgtttgccgctcaattcttcaagtttgacaagccccgccgtctggctacttccggcggtttgggaaccatggggtatggacttcccgcctccatgggagcttgcctggcttatccggacagactggtagtgaatattgacggggacggttccatgctcatgaatattcaggagctggcaactattcatgtggagcgtctgcccgtcaaatgtattatcctgaacaaccagcacctgggcatggtggttcagtgggaagatttgaagtatgattccaaccgggcccagaccttcctggcggacccgcacgacaattatgatcctacccataaaacggaagatgtcatctacccgaactatccgcttatttgtgccggattcggcgtcaagtgcgagcgtgtgcttcgcatagaggagcttccggcggctatcacccggatgattgaatcccctgaggcctatgtcctggacgtcatggttccccatgatgtgcatgtgctgccgatgattctggggggcatgagctacaaggatgtgattctggaacgtattgccggggatggttccgccaaaaaggcgtctgaactgggcaaggaaatcccgaccgccttgtaaaagtgaggaaaatttttcccattgagccttaagctggagccgtccgtaagggcggctcctgtttttcatggcggaacaagaggaagacaatgccggtttattgccgtcagggaaggacatttccgctgtaagaaatatatttccggatattcctgtttcccgggaggtggatgcctgggtttgtaaggtatgaggaagatggttctggatgcggcagaaaagaacggtcagcatcaatgagccaaattgagtgcaagctggctcggacgtgaagaaactgaatttttttgaaatgatacagcctcggatgctgccttgcgccaacctcaagctcacagaaaatttccgggaatccggcgtatgctgtaagtgcttgggaaatgtattttgacaaaaaatctcctttgatcaggcctgtctgcatccgttttgttcatcaggttggcgcaaaatctttgttgcatgtttgatgctcaaactgtattagtcaggccgtcgcacccacacgggtgcgtgaattgaaacacccggccgggtgaaaaaggatttaaggtcagcagtcgcacccacacgggtgcgtgaattgaaacccgccggatgacattttccgggggactggagacggtcgcacccacacgggtgcgtgaattgaaaccaacaaaccgatacgtcccccaagttgtttcttagtcgcaccctcacgggtgcgtgaattgaagtttttatgtatgtttgacatatttaaatacgaatcgttgttttattaagggagggagatatattgaaataagggtatttgttgctgaagaatgaaagatggatttttgtgttttttgttgaatgcaatattttgacggaggaagttggtttttggctgatagaggagaaatgacgggaagtattattggacgaatatgaaaagatattgtctggtttccgggttatgtttgtgcctgttcatggggatattttcatgtattccggaagctccggagcataagacggaaaaagatgcctcagccattgttctggatgaggattcggatataatctggaggaatttttctttgggccgcgtttcattcgatgataaggctccgcatagtaaaggttcccgcatttttcaccgattgattccagatacggaggtttatatccgtcagttgtcccgtattgttctccatacgttgtatgagagtcctgaagaatgtattgttcctgtccaccatttgcgtttcatgctggaggataccgatggcgttgcctgcaaatggggaggaaatggagaggttgccatttcctgcagcacgcgccatattgaggggttgtttaaagatgatgatgatgcggcgaaggtttattttgaaattcgaggagtcttgttgcatgagctaacccatgtttaccaacaggaaccccaggggataggttcctatggaacgaacagggaatttagagcatttatcgaggggatggctgacgccgttcgtatagctaacgggggattccatagaggagcttaccgtcctacgggcggcagttatatggatggctacctccatgcaggttatttttttgtgtggctgcgggattataaagaccctgaatttctacgcaaattgaaccgtagtgctcttgaggtcgttccatggtcgtttgatggcgccgttaaatatgccttgggcagcgagtatcatattgatgagttgtggcgggagtatcaaagggtgatggaagaggagaaatagaggcgcttcatagttcaggagttttgatgggatatctagacaggaggctggaatagaaggaatggccgtggagagtgttcttaaggcgtgggtatttctcgtttaccatttttgaaaagcaaggtctgagtggcccggcagaaagacaggatgcctcatgcttcgcagtatttgaatcctgggcgggacagggtgccttggacagagggatgggaaacggtgaggaggagcgaagcccccatgctgcatgctggaaacgggaggcagggatattctttcggctggacaaacggagggacggaagacattctaggcgttccatggagggcatacgctattacaaccgctatacgggcagggaggaacgggagcaggtaccgggggagaagtatatgcaatggatttacggcactgcttcggggaaggcggcactgcatgtcctgattaaacgcggcgttttttcccgtttgctgggttggttgaagaatcgcccttccagcgcccgctccattccctcctttgtggaggagtacggcattaatatggaagattctctcaagggagtgggggagttcaggcatttcaacgattttttctaccgccgcctgaaaccgggagctcgccctttggccggcggggaggatacggccgtttttcctgcggatgcccggcacatgggttgggaacgcgccgaccgaattaaaaacgttttcgtgaaagggcagcgttttgacctgccttcccttctggggagcgacaccctggctgagcggtatgcggccggcgccgtcgtcttgtcgcgcctgtgccctacggattaccaccggtttcattttccggtgtccggggtgcccgggccctggacgaagctgggaggcccgctggcaagcgtatctccgtattgcctgcgcggccgtctggcgtggctatggactaataaaaggaatttgaccctgatccggtcagagttgtggggagaggtcgccatgctggaggtgggagctaccggagttgggttgattgaagagacgtatgttccgggtgttttctccgcaagaggggcggagaaggggtattttgcctttggaggctccacggtaatgtgcttttttgaaccgggaagagtcagtttggcttccgatttgttggaaaagacggaagaaggcctggaactgtttgcccggcagggagacatgatgggcacggcagcgacatagcctccgggctggcgtgcctgtcctgcaatgttttgagtagggctctttcctggagcctgatgacggaatgccggggatggattccggcgtttcagggcggattttcggattttttgattttccgaagtgccaggcgggttatttcattttcgcaatggcgcgggccatatccggagccttgaaggtagaggagcctgccaccagcacatccgctccggccagagcgcattgagcggcattgttttggccaattcctccatccatttgaatgaggaaggaggcgcggttttccgtgcgccattcggcggctttttccaccttgtccaatacggaaggcatgaaggactggccgccgaagccaggcactacggacatgaccagcagcaggtctatttccgccaggtaaggttctacggcttcaaagggtgtggccgggttgagagccaggccgttttttactccggcttcccggattcgcccgagtgtgttgcgaatgtagtaggagtctcccagttccacgtgaaagcagatgaggttcacacctgccctgacgaagcggtcaaagtagtggtccggccgttctatcatcaggtgggcatccagaaagcggtccggccccaccgcttttctgacggcggcgcagatttccgggccaaaggagatgttgtccacaaagtggccgtccatgatgtccagatgcagccagtcggcaccggagtcaaaggctcgccgcgcttcctccccaatgcgggagaaatcagcggccagcagggacggggagattatggtcatggctgagggaggcttttcgggatgtcagttggttacaatgttgacgaggcggccgggtacgacaattaccttgcgcacagtgacgccgtccaggaaggttttcaccttggcggaagccagggcctgtttttccagttcttcccgggagatgtccttgggcacttccagtttgtccctcagcttgccgttcacctggatgaccatgggaacggtattttcctccagcagggcttcctcccattcaggccagcttttctggcaaagctgcgtctgggccagagccgggaaggttgtttgcaggcggctgtgtatttcttccgtaaggtggggggcaaagggattcagcagggtcaggaaagcatcatagtcctgaacgtccaccacatccgcggaggtcatggcattggtgcattccatcattttcgcgatggcggtgttgaaggacatgccattgatgtcctccgtcacttttttaatggttttgtgcaattccttgcgtacggcaagcaccccggcttccggagcgttctccaccagtttggagttgatttcccattctccttcctgattttcccggaaggccacgcgccagacgcgggccaggaagcgggaaatgccttccacacctttggttgcccagggtttcacgtccttgagagggcccatgaacatttcatataaccgcagggagtccgcgccatattcgcggacgatgtcgtccggattgacgacgttgccgcgggatttggacattttctggccgtcttcccccaggatgagcccctggttgacgagtttctggaagggttcattggtgctgaggtagcctaggtcaaagagtaccttgtgccagaagcgggcatagagaaggtggagcacggcgtgttccgtgccgcccacgtacaggtccacgcctccgggggagccggcggagcccatccagtattgttccgcttcccggctgacgaagcgttccgtgttggccggatccaggtaacgcaggtagtaccagcaggagccagcccattggggcatggtgtttgtttcccggtgggctgtgggcgtgtaggctatccattccgcagccttgaccagcgggccgcgggggtctcccgtgggggcgaagtcgtccagatccggctggagtacggggagttcgctttccggcagggcgcggtggcgaccgttttcccatacgatggggaatggttccccccagtaacgctggcgggagaagagccagtcgcgcagcttgtagtttactttgcggcgtcccttgccgttttcttccagccagaggatcattttttccttggcttccggagtaggcagcccggtcaggaagccggagttcacgctggaaccttcataaccgcagaagccgcgccagtccgtgtcttcactgggcggctgaactacctggagtatgggcaggccgaagacctgggcaaaggcgaagtcgcgttcgtcatgggcggggacggccatgatggctccggttccgtaacccatcagcacatagtccgcgatccagacgggaatttgttttccattgaccggattgacggcataggctccggtgaagacccctgttttttccttggagaggtccgtgcgttccaggtcgcttttggaggcgcactgggcgcggtattgttccacagcatgtttctgttccggcgtggtgacggtatctaccagagggtgctccggggaaagaaccatgtaggtggctccaaagagggtgtccggcctggtggtgtaaacagtgatcgtttctccgtccagggtgaagtccacttccgcaccttccgatttgcctatccagttgcgctgaagcagtttaatggattccggccagtccaggggctccagctcgtcaatgaggcgttccgcgtagtccgtgatgcgcagcatccactggcgcagggggcggcgttccacgcggtgtcccttggatttccattcctccacttcctcattggcaaggacggttcccaggtccggggaccagttgacggcagcttccgctacgtaggccagccggcgctggtcgatttcttcccggctcaatccctgttcctccagttcggaaacggggcgcgcctttttcagttccttgttgtagtaggagttgtaaagctggaggaatatccactgggtccaacggacgtattcatggtccgttgttgctatttcccggtcccagtcgtaagagaaccccagcattttgagctggcggcggaagttgtctatattccggaaggtagtgacggaggggtgctgtccggttttaatggcgtattgttccgccggaaggccgaaggagtcccaccccatgggatggagcacgttgaagccgttcatgcgtttgaaacgcgctacaatgtccgtggcggtgtacccttccggatggcccacatgcaggcccgccccgctggggtaggggaacatgtccagcacgtagtatttgggtttggacgcatcaaagccctcttctccggggttgtttactttaaaggttttcctctcgtcccagatctgttgccatttaggttcaaaaacgtcaaagggatatggtttcttgcgctcggacatgacgggagggaatgtatactccgcccgcgggtcaatcaagcctaaaccaggcggaatgcaggcgcttccaatgctccgggggcatgatgccgtttttcggaaaaaaggggaaaggtaagaagacgtttgcgcgtatttcttaactgaaaggtttttgttgattgcgaccatgaagtttacttcctgtattatgtctgccgtctgcggagcattgttcctgtttgccggggcatccgctctgggcaatggttccaaccctgtttccggaaagaagcccaatatcatcgttttcctggtagatgacatgggatggcaggatacttcccacccgttctggtccgacagccagggcaacccgaagaaaacctttttgaacaggcgctaccggacgccgaatatggagaagctggcttcccagggcatgacgtttacggatgcatatgctcatcccctttgcactccttcccgggtgagcctgatgtccggcatgaatccggcgcggcaccgcgtgacctgctgggtacgggaacagaacgggacgacggacgccaacagcaggagcctcctgcctccggactgggcgttgaacggccttcagcctataggcactcccgccaggggaacgacaaaacgccccatttccggggaggatatgcgctatcacatgacgcgtccttttgccacggcggctacactgccagagatgctgaagaagtgcggttatgttaccgtccattgcgggaaggcccatttcggcacgcagggaactccgggttccaatccgttgaatatgggatttgattataatatcgcaggtacggagatcggccatccggcggattaccgcggttccaggcattacggaaaggggtttaaccatgtgcgcggactggatgagaataattattaccaggacgatgtatttttgacggaggccctgacgcgggaggccattaaacgcctggaagccatcaggaccaatcccagggaggctggcaagcccttttatctgtacatggcccattacgctttgcattctccgctggatgagcgcgcttacgacaagaggtttgcggatgcctacaaaaacccggaggacggccacaagtggtcccggacggagaagcattattccgggctgatcgaggggatggacaaaagcctgggggatatcatgaagtatctcagggaacatcatctggaaaaaaataccgtactggtgtttatgtcggataacggaggcctggccatctccggcagactgggcaatgaagaggccaattaccctctttccttcggcaaggggtcgtgcatggaaggcggtatccgggagcctatgattgtttcctggccgggcgtgacgaagggcgattcaaggtgtgccgtcccggtggttattgacgattttttcccaactcttctggatatcgccggatgccggaacgtagaagttccgcagaagcttgacggcttaagcctggttcctttgctcaaaggcggccggtttcctgaagaccgcccccttttgttccaccagccgaataattggggggaaggcagtcggcaggcgcctcagtatacttcttccaccgcattgcgccagggggattggaaattgatttaccgccacctgacccagagctttgagctgtaccatttaaggaaagatatcggcgagaaggaaaacctggcttccagggagccgcggaaaaccagggaaatggctgttgtcatgggcaggttgctccgggagaggaaggcgcagatgccaacctataagaaggacaatgagctgggcgctcctgccgggagttccgttccgtggcccgaccaggtgaaggggaatggtttttgatgatccgcaataacgtttttccaaagttttttcataacccccggcaggattcacgtcccgccgggcggaccgggtcgaggctggggtgccctcacttccttttccagtagttttttctgtccggtataggaatggtgtgtgttttcttttccggatgcagggtcatcgttcttcgtgaatgaaggccgcagcttgtttcggagtaaggggaggaatgagcaagggaactggttcgggagggataaaaacgccccgacggatatggcgtcggggcgtgacagaggttaaataacgaagttccctgaaagggagggtttaaaaatcatcggtgacagcggcatcatccgttgtcgtggtatcttcgctttcagcagcgctgtccgcagagggttcctcttccgttccggcagtatcgtcggcaggagtttcttccgtagcgcctggttcagaaacggacgttgctgcggatttggcagcgggcgctgcggacggagcagctcccttgggcggaacaacgactttcatggccggaggggcgggaacgggagtttccagaccgtcagccttgcgggtgctgacgcggagtccgtcagcataagccaggtttttcaggatggcatagcccagggcgggagcccggtccgtcgtgttgaccagcatcttgaagtggttgttgacggacatcttacgggcgtccttgccattgcggaagggaatgatgcctgtcatgttgccgtcattgtcaatgcagatcgcccagaaagagcggtctacctggatgaagtactgcgggcggatgtagtccatcgttttccattcagcgcccttgatgtattcctccatggcgcggcgcgcattggccggcatgctgccccagtcagcgtaaacccgggaggtcagcgtttcacggccattgtagccgtgcacggatacgtgctgggcagtagcaaattgacgggcatagctctcgggagaggcaggttggcaagagctggtgaagagcgctgctccggcggtcaggatgcaggctgctgcagtagtgaagggatgaatgttagtcatggcaatcgcaatggttacgttataaaagaggaaaatacatcccatttcaaggaaaagaatgcaggaggtaccgttttgtgccgttttttgacgtttccgtttgatgcggggggctggcgggagtggggaaggcgttctcatgcccgtctcgcaggtatgatggtaaattactaaaatttttctcgcaaatcgttctgaatcgcttaggttgtcgttgctttatgtccgcctttatcatcagcctgccggccctggaacgcaacgctcttatcctgagggatgtggcggatgccgcagggtgccgcatcgctctggcgctgaaggggttttcctgctggccctgttttgaggccctgtccccctggctggacggctgctgcgcttccggcctgtgggaggcgcggctggcccggcgcaggttcgggaagcatgtgctgacttattctcccggccatgccccggaggaaatagcggagctggcggagatttccagccatcttgattttaacagcctgacgcagtggagccgtttccgggaggaagtgatgcggcatccccgctttgtttccggtgaattgaaatgcggcttgcgcgtcaatccccaatgttccaccgggcatacgcccatatatgacccctgtgcccccggttcccgcctgggcgtgacgccggacatgatgcagggggcggacctgtccggcatttccggtcttcattttcatactttatgcgaacagggagcggatgacctggcggtaacgatggatgcggtggaacgccacttcggccatcttctgagccgcccggagatttcttggctgaatatgggaggaggtcattggattaccaaacccgactatgaccggaagctgctggcggcacttatccgccgcatccgcgaacgctacggcgtggaagtatggctggaaccgggagaggccactgccattcataccggggtgctgcggtgccgggtgttggaccttttttccgcggagggggtgaatcatgccattctggatgtttccgcatccgcccacatgccggatacgctggaaatgccttatcgtccggatgtgttccagattgcaggagacgcttccctccgttccgcgcagcagcccgccgtacggttggaaggggagagctatgcgctggcggggaaggccggggaaaaagcttatacgtaccggctgggcgcccccacgtgcctggcgggagaccggctcggagattattccttcgcggagcccctggcggtaggtgacgaacttgtgtttgacgatatggcgcattatacgatggtgaagactacgtttttcaatggcgtgcgccatccggacatcgccgttcagagaaaagacggttccgtggagacggtgcgccgtttttcctatgaagattttgaggcccgcctgggctagaatatttgaccagacagattgacatggcaacagctaaagaaggcatcaagcagaaagtccacgggtggagtcaccatgattccgcagatttgtacggcattgacgattgggggaacggttatttccgcatcagcaaaaagggagaggttaccgtacgcctgaatgacgaggatggaggaaagaaggatgtcagcctgtgcgatctgctggaggggctgaaggagcgcgggactaccgttcccgttctgttccggttccgggatttgctgcgcagccgtattgcggagctgaacgacagtttccggaaagcaatcaaggaggcggggtaccagggtaagtaccagggcgtttaccccatcaaggtgaaccagcagcgccaggtggtggaggagattgcggagttcggcaccaagtatgattacggtctggaggccggttccaagccggagctgatagccgccatggcccatatgcacaatccgaatgcctatctgatttgcaacgggtacaaggatgacgagtttattgacctggcgttgacggcccagaagatggggctgaatatttttattgtgctggaaatgccttccgagctggacgttattatggagcgcgccagaaggatggatatccgccctaatctgggcgtgcgcgtcaagctggcggccaaggggtccggtttatggcaggaatccgcgggggataagtccgttttcgggttgaacgcagcccaggtggtggatgtggtggataagctgaagcaggtggatgcgctggattgcctgaagctgctccattatcatcaggggtcccagattccaaatatttccgtggtgcgcgaggggctgacggaggcggtccgcatttacgtggacctggtgaaggagggcgcccctctgggcacgctggacatgggcggcggcctggccgtggattatgacggttccaagacgaatttccattcttcctgcaattattccattgcggagtttgcccgtgacgtggtggaggttgtgggagacatgtgttccaagtacggggttccccatcccacgctggtgacggagtccggacgggccgtagtggcctattattccgtgctggtgttcaacgtgctggatgtgacgagcgcgccgggcgaggaacctccgcccgagcttccggatgacgctccggagctgttgaaggcttttgcggatacggaccggacgctggccaggaagaatatgcaggagtgctataatgacgcctgctattaccgggaccagttgagagcccagtttttttacgggaacgccaccctacggcagcgcgggctgggagaggcttattattggcatatcctgagccgcatttcccgcatgctggcggagatggagaccattccggaggatctcagggagctttcctgctccatggtggacttttattacggcaatttttcactgttccagtctcttccggattcctgggccatccgccagcttttccccgtgatgcctctgcaccgtttgaatgaacggcccacgaataaggccgtgctggcagacatcacgtgcgattgcgacggaaagatagaccatttcattgaccgtgaggacgtggcaaccgccctccccctgcatgccatcaaacccggcgaggacgattattacataggcgtattcctggtaggagcctatcaggagaccttgggggatttgcataacctgctgggagatacgaatgtggttggcgtgcatctggaaggcggccgccccgtttatacccatgaagtggagggcgatacggtgtccgatgtcctttcctacgtggagtatgatcccaaggagttgatcaacaagttccgcacgtttgcggagcaagccgtagccgaggggaaaatatctccgtccgaacgccggagagccttggaagtgttccgttccggattgaatggatacacttattacgaactgtaggaaacggtcttgtcttttgcttcaacagggagcgtctgtcccgtgccggcgcgttttcctttgttgcggatcaggagaccagcggttcttccggcggtttcgtttcttcaatgaccttggctggcgtcagggcccagaagcgcgtggccgtttgcggagagatgcctttcatgttcaagtaccgtgtgcggagcagggaggaggagcggtgccccatttccatttgcaacaggttgtagtccttgaagtgcttggcgtggtagctggcgtaggtgtgccgcaggcagtccggcacccatgatttttttcttcctccccagccggcttttttccggattttgcgccacttgattgtccaccctttcgggcagatgggagttccgggtccgggtttggtcctgtcacggcagaatttgagccatttggcgagcacgggcaggatggtgacgtgcctggcgcctccggttttggtatgcttggagttcagaatgatacagccgtcgcggagagcgatgttttcccagagcaggcgttccacttcctgcgggcggattcctgcaaagatcatcagcgccgctccggctgcgcagcttccgtcaaattcttccatggctgccttgagaagctgagttatttccttcagcgtcagagcggggatttcctgctcctgcagaaaaggcgtgtctacgcggaggatgggattctcgtcacaccatccgcgtttgacggagaacgagaaaattccgctcaagatgagcctcgctttgtgcctctgccgggatgtggtaaaggtattcatcaggatgttctggcattcctccacgctcaggttgcgcagggaggtgtgttccagttccggattgctctttttaagcttgtggatgatgctcctgatgtccgtcagcgtccggggacggcggtggcttttggaacgtaggcattccacggccgccgtgccgaaactgacggtttgatgtttgtttttaatggcgttcaatcccagggagacgacttcccggcaccgggtaatggtacagatttcatctccaagggcttccttgatttccaataccagccttgcagcctggatcagggtgactgattccccctccagaagtgcggctccgacatatttcaatttgtttgtattcggtgcttttttcatgttcatttctcgtgtttgtccaaacacggttttaatgaaaaaggctatccttataatggggaaaacttatgctttccactagaaaacgcgtaaccgtcaaggatatgttgttacttatgttttctttgaaccggccgcaaaatcaaagtttctgatggtgcaggaaccgaaaatgttagaaagcgcggctccctgtgctgaatgtcaagatggacgtgacttgtccggcatgagtatatttctgtcggaagaggggtaaaggaacggccggatgaaagtattttatatggctgaacgtatatggtaggtactgcttttctgtaccatgaacatcagaattcattctttcaacgtatcatgtgtcggcctttgctgcgtattggggtcttttttcgcggcggacgcccgtgaggtttatcccctgaacggttcctgggatttcagttttaacgggaagcctgctgaaaaagtgacggtgccccatacatggaacgcagaggatgccgccaatggtgctcaggggaagcgggaagacgccaaatccgtcaacagtgacgcctaccgccgcgggccggccgtttattcgcgcacgcttccggtggagcccaggccgggcaagaggtatttcatccgcggcgggggagccagcattgtttccgaggtttccgtcaatgggaaacctgccggcagccatgagggggcgtttacggctttctgttatgaaataacgccccttttgaaaaaaggctccaatacgatttccgttctggtggacaacacgcagcgtaatcatatcgccccccagcgcggggatttttccatgttcggcgggctgtaccggcccattgaactgattgagacggacggtgtctgcattgatcctcttttttatgcttctcccggcgttttcatcacgacaaagtctttaagcaaatccaaggccgaggtggaagtgaagacccttctcaattcggacggaaaggccggggatgtggatgttgccgtggaaatcctggacatgaagggcaggaaggtagccgggaagacggtaaaggccgccgccggggaaaagaatagactggaggttcccgtaacgctggcaatcgccaatcccatactctggaacggagtgaagaatccttacctgtaccaggtgaaaacttccatcaggacggcagatggccagacggatgagctggtgcagccgctgggactgaggacggtttccgtcaatcccaaggaaggttttgtcctgaacggaaagaccatgcagatcaaggggggcagccgccatcaggatatgaaggggaaggggtgggccctttccccggaagatgaggcgcgggatatcaggctgattgcggatatgggggcggatggggttagaacgggccactatcccgcatccaccaatatttacgacctgtgcgacaaggcggggctgattgtctggtccgaggtccccaatgtcaacctggtgtgggatacgccggagttccgggagaataaccgcctccaggcccgggagatgattttccagcattggaatcatccctccatttgcatgtggggaattttcaatgaaatcggacaccagcccgaggctgccacgagaggagtggacatggaagctgagttgacggaattgaacaagttcgtgaaggagactgatccctcccgcatgaccgtgggggccagcaatcaggcgggccgcagaaaactgaacaatattcctgaccacatcgcattcaatacgtatcccggctggtacggaggagggcccgaaaccatgaagggcaacctgaacggctacatccgcgactatggcggcaagatgggcattgccgtcagtgagtatggtcacggcgccagcgtggacatgcatgagaatccggcccaaagaccgtctcccaccggattctggcatccggaggaatggcagtcccatgcgcatgaggtcaattacaggtgcatcagggaaaggccggaggtgtggggggcctttgtctagaacatgtttgacttcggttcctcttcccgttttgagggggaaagccccggcattaacgacaaggggctggtgacctatgaccgcaagacgcccaaggacgcctattttttctacagggccaactggagcccccgtcctaccgtatacatcacatcccgcaggtttgcggaacgtacggaaaaaacggtgcccgtgaaggtttacagcaatggttccgtggtgaagctgagcgtcaacgggaagcccgttgggagtgtcaaaccggatgatttgaagcgcgccgtctggccggaagtgactctcaagcccggcgtcaacactattacggccacggcttccataggagggaaaacgtacacggattcctgcaagtggacgttgaaccctgccggaggtgacgggaagaaggattcagagcgttatcaggatccgtccctgaaaaagtataagtaagcaattccatattcattccgagatgaagacggtacgcgcgtttctgttttccgtgatgtgtctggctccggctcttcccctgctgggggatgttccggattgggaaaatgaagaggtgacgggaatcaataaggaggctccccgagcctccgtttttccggcatcggataaaacgttgagcttgaacggggattggaagttcaaattttccatgactccggacgagaggcctgccgatttcttcaatccctcctattccgtttccggatgggatacggtcaaggttccttccaactggcagctttacggttatggaacggccatttacacgaatgttccctatccattcaagccgaatcctcccaaggtaatgggggaaccgcccaagaactggccggcgtacagggagcgtaattccgtgggttcctaccgccgggatttcaatttgcccgtttcctggaagggagagcaggtgatgatccggtttgacggggtggagtccgccttttatgtgtgggtaaatggccgtcaagtcggctattccgaagattcctatacaggggcggagtttgaccttactccccatgtcaggcccggcaggaatacgattgccgtggaagtataccgctggagcgacggttcttacctggaggaccaggatttcctgcgcctttccggcattttccgggacgtgaccctgtttgcccagccgcagacgcacgtgcgtgacctgttcctgaaggccggactggacagggaggattacacaaccggggtactggacggaacgttcaccatccgcaattccggtaaaaaggatattcccgccggcatgaagctgaattattccatcgacgggatttccaccaaattgaactgggagggcaggaacggttccggccgcgtgcagacggataacaggggaaggctggattccggaacgctggaggttccccccattccctccggaggcgaggtgcagatttccctgaacaggaaatttcccggtgtgaagccatggacggcggaaacgcccaacctgtacagggtgacttattctctgaatggaaaagatacccgttccgtcaatatcgggttccgttccgtggagattgcggataacggtgccgtgctgattaacggcagagccgtcaagttcaagggggtcaaccgccatgaagcccatcctgattacgggcgcgccattccgcgggaagtgatggaaaaggacgtgcagattatcaaggcgcataatatcaataccgtccgttgttcccactatcccaatcatccttatttttatgagttgtgcgaccgctacggcctgtacgtgatggacgaggccaactgtgaagcccacggcatccgcaatagcagcatggatatttcccggaagccttcctggaagaaagcccatgtggagcgcaatatgagcatggtgcatcgttccaagaaccacccttccattgttttctggtccctgggcaatgagtccggcaacggtcccaattttgaggcggcagcggcggctatcagggcttatgacactacgcggcccctccattactgcgaatttccgcacggccacaaggccgtggatatggattccgccatgtatccgcccgtggaccgggtggaaaactgggggaagcagaaaacttcccgcccctttttcgtgtgcgaatatgcccactccatggggaatgccctgggtaatttcaaggagtacatggatgccttcgagtcttccccgcgcatggtgggcggagccatctgggatttcgtggaccagtccctccgcgccaatcctgacggaaacggcatttacaagcccgcccctttcaagggagtaacacaggcttacggcggcatgttcggagacaggcccaaccaggccaatttctgcgacaacggcattattcttggcaaccggaacaccacggccaagacgaaggaggtgaagaaagtataccagtacatggcttttgagcgcaaggacggttccctgtccgttcgcaacaaatatttccataagcctttgaaaggttatacgctttatctggtatcccttgttcccggaggcggccatgccgtggagcgcatggttctgccggaggtcccccccggcaaatccgcaacggttaatctgccttcagccgctatgcggaccggttccctgatggttctggcggatgcccggttcaagctcccggaagacgtgaaggaactttccgccaagcaactggaacatgtggtgaatgagtgcgaagcttacgagtggtttccggcatctgcagagaaggaggtttccgtgcctcccccggcggcgctgcctgctgtttccgtgcttcagggggattccgtggtcgtgcagggaaaaggtttttccgcctccttcaaaaatgggatgctttcctccctccggtatggcggccgggatttgattttgcccggctatccggtggagctccaggcgtaccgctctccggtggataacgatgcctggatcaggagcaaggttgaagggaaaatgaagatgcagaatatgaaagcggaatattccgacgttaaagctgccgtcatttcccccggcgtggcccgaatcacggcacagttccggacgaaaggttccgagctttccttttccggggaagtcgcgtggacggttttcggcaacggcattatcaatgcttccgtccgaatgtatccctccgccaagggagaagaactcctccggctgggcgtcactttcgggatgcctgccgcgtatgaccgggtagagtacctggggctgggaccgtgggataattaccgggaccgccgcacgagctgctggaaggacattttccgcacttccgtggacgatatgttttttgcttattcccggccccaggatatgggcaatcgcatggaaacggactggatagccttgtccaaaccccaagaggaccaggctctgtgggtgggagcctcctctcccagggctccgctggaggtttccgtcctgcgttatacgccgaaggagcttaacgatgccaggagtctggacaggctgccggagaaaaataaagtgattgtgaatctggatgctttccagatggggctgggtggctcttcctgcgggccccgcccgctggctaagtaccagacattgagcggggccatagccctggggtttgtgctggctccctcgtccgccctgctgaatctggcgcgcacggggctggtcgttccccattcccctgtcattgaacgggatggggacggcatggtcagtctgacttcctctacgcccgaggcggagataaagtattccgtcaacaaggggccggaaaaaacgtaccggaatcccttcaagcttcccgaaggggaagtgagggcctgggctgcctccgtgaagtccggcaaggttccttccacgtctcccggagagaggaagttccccctcgtcaaggggcagggcgaatggaaaattctaagcgcttcttcggaagagccggataccggtttcgcccattttgccattgacgggaatccggatacctgttggcatacatcctatacgaacggcctgccggggttcccccactccattgccgtggatatgggaaccagaatgaagtttaccggatttatctacacgcccagaatggacaaggacaagggcctcatcagccagtacacgttttccgtttccgatgacggtcggaattggagggaagtgaaaaaaggccagttctcctaccactatatccggaaggatccggctgttcagcgcatcgacttcggcaggcctgtggaggcccgctactttaagcttgacgcccggtctccggtgaggggcggggaacagagcgccaccgttgcggagctgaatatcattacccaataacggagcggcaggcgttttgcactgcttcccggatggagaagttttccagccgtgcgccctttccggggtgcacggcttgttgttgcgggcttttcagggtgcggaaatgtttttttaatgaaagaaagaacatggcggaatggtaacatacgcatgcgcaagatgatggcctgcatgctgggcgctgccctgtgtttttccatggccggagcggaaacaggcgtttcctctgcggaaaaagcttcacccctgttcgggaggatgatctggaatcgcggctgggagttccggcttgaggacgagcccggaaagagcggctggcagacggttcatctgccccatacgttcagtctgccctactttatgtccgattccttttacacggggttcggctcctaccgcaggaagcttgtcatgccggaggaatggcaggggaagaaggtgtttctggattgcggcgcagctttccaggtggcggaggtgaaggtgaatgggaagactgcgggaaggcatgaaggggggtatacggccttccggtcggatttgacgcctttcctgaagcccggcgagaactgggtggaggtacgggtggataaccgctggagcccccgcattgcgcctcgggcgggggagcatactttttccggaggactgtaccggaacgtgcatctgcacgtgtgttctcccgtgtatttgcccgcgcacggagtatgggttcagacgccggaggtgacggaggcccgcgggaaggtccggattttgacggaagtgaagaatgataccgggacagtgaggaaagtgacggtgcggcatactgtgcgggatgagcaaagcggctgcgtggtgctgcggggagagaagggcgcggaactgggggccggggaagattctcgcgtacaggctgacctgcctcctctggcttctcccaggttgtggagccctgcggcccccaatatgtaccgtgtgacgacggaattgttggacgagaaggggaaggtgctggaccgggctgaaaatcccctggggttccgtactctggaggtgacggcggaccggggcatgttgattaacgggaaacctgtttatttgcagggggccaatgtgcaccaggaccacgccgggtggggggatgccgtgacggacgccggggcccgccgtgatgtgcggctgatgaagaacgccgggtttaatttcatccgcggatcccattaccctcattcccaggcttttctggatgcttgcgaccgggagggcatgtgcatgctgaatgaaggcgttttctggggaatgggcgggttcaaggagcatgacaggtactggaattgcgatgcctatccagcggaaaagaaggaccgtattgcgtttgaggaaagctgcatgcgccaggtgagggagatggtgctgcaattccgcaaccatccttccatcgtcatctggagcatcagcaatgaaccgttttttaccaggcatgcgccggaggccagggctttgtgcaacaggctcattaccttggtgaaggagttggacccgacacgccccgtgtgcgccgggggcgggcagcgcggaaattttgacaagctgggggacatggccgcctttaacggggacggctcccatgtgaagacgcccggcaggcccagcatggtgacggagtatggttccgtgagctgccggaggccgggggtgtatgcgcctggctggggggatatgaaaaaggataaggaagcggggattcgctatccctggcgcgtgggagaggcggtctggtgcggctttgaccacggtagcatctggccttccggagggcgcatgggcatcgtggattacttccgcattcccaagcgggcctggtactggtacaggaacgcgttgaggaatattcctcctccggagtggcctgtggaggggactccggcacaggtgaagctgtccgcggacaagaaagttatcaacccggcggacggcacggatgacgtgcatgtgaccgtgaaagtggcggacgccgccgggaggcagatatccaatgccgtgccggtaacgcttacggtggaatcgggacccggggagttccccaccggcaaaagcattacgttcacgcccggaacggatattgatttgattgacggctgtgcggcgattgagttccggtcttattatgccgggaagacagtgatcagggcgtcttctcccggattgaagggggatagcctccaaatcgtttgccggaatgctccggcttacgtagcgggcaggagcgcggaaacgcgggaaaggccctacaagcgttttagcgcaaaggagagggatatccagctggcgcggtacggacggcccgaatccggagagaaagccaatttggctgtattgaggccctgttccgcttcctccggatttcaggaggcgatgaaggcttccgacggtgacgatgtttccgcatggcatccgtccgaggaagacaaagcgccgtggtggcagctggacatggagtttgaattccgcctggaccgggtggaggtgaaggccgccggaagctggaaggggccggctcccgcggttcaggtcagcagggacggaaatagctggaaagacattaaagccgttttgcgcaaggatgggacggagctgaccgcaatgtgtccggaagggaccggcgccaggtacgtacgcatccgtctgtctccggggcagggaattgcggaagtggccgtatggccggcggatgcgtcatgagggttcccgtttttccggaacaggaggctttttcctgttactgcgcgtaccggagtttccggcgtcttcttccgtccgctggcggcgcagtttgtcccaataggccaggcgtttattgatttcccgttcaaaaccccgttccggcggcctgtagaaccggcggcggggcatgttgtccggaaagtagttttgcccggagaaagcgtccggcgcgtcatgatcgtatgcgtaattctttccatagcccagttccttcattagtttggtgggcgcgttgaggatgtgtgccgggggcatcagggacccgtattcccgtgccgctttccgtgccgctccccacgcggtgtaggcgctgttggatttgggggcgcagcccaggtagataatcagttcagcaatcgccagctctccttccggagagcccaggcgttcataggtgtcccacgcggcaatggccatttgaagtgcggcagggtccgccagactgatatcctccatggcgaaacgggtcaggcggcgcaggaggtagagagggtcctccccgccctcgagcatgcgtgcggcccagtacagggctgcgtccgtatccgacccccgcagggatttatgcagggcgctgatgagattgtaatggccttcccggtccttatcgtaaaccggggcccgctgctggacaattttcagcagtgcgtccgagcccagcatttcatcgggcttgcagaggtcaaagacgctttccatcaggttaatgaggtagcgtccgtctccgtctgccagttctatcagggtggcgcgcgcttccggcgcgagcggcagttctcgctgaagaagggtttccgcccgttcaatgatgctttccagagccggggcgtccagggagtgcatgacaaagactttgcagcgggagaggagggcgctgttcagttcaaaggaggggttttccgtagtggcccccaccagcgtaacggttccgttttccacatatggcagaaaaccgtcctgctgggcgcggttgaaccgatgtatttcatccacgaacaggagggtcccatggccgtattccctgcgcctggccgcttcgtcaaaggcttttctcaaatccgccatgccggagaagacggcggagagagctgcgaaatgcatggacgtgcgcgtcgccagaatgcgcgccagcgtggtttttccgcagccgggcggcccccacagaataaagctggtcatcttgccggagtccgccatgagccggagaggtcctccttcccccagcagatgatcctggcccatgatgtcttccagtgcggacggcctcaggcggtccgccagagggcggtccgcgaaggcggaaaacaggcccggggtgtcgtcttttttcatgatgcccatcatacgccgccggtaaaaggaaggcaaggggagcctgatggcatttcaggcggcccggctcgacggcacgtcgtggagaggaggttgcaccccggttttgacgggtggaagagaagcaggggagaaaaggaaagattcctgggaaaaacagtgtatattgagcatgatgttcagacatgtttcccatgtgtttctttttctgttttccggcttatgcggcgcggtcgtgaatgctcaggatcagataataccccggcccgtgtccgtgagggtggaggccaagggggcggcaacgcccgtgaagctggatgaaggaatgcgcattgtatgcaaggagaaggacggggagttccggcgccaggctcacttgttgcagcagtttttgtcacgcggaaccggattggctctggacggggctggcggtacgggaataatccgcgttgtgaaggacgctgccctgaagcagtacgggccggaggcataccgtttggaagcggctcccggaaatatcgtcatcagcgccgcgactcccaaaggagtttattatgcagggcaaagtctggcgcagatgctgcctgccgcctttttcaacaatggcgtggacaaaaagagcgtaagttggaatgtggcggtgaagcctttttccatattggattatccccgttttgcctggcgagccttcatgctggatgaagcacggcatttttttggagaggaggaggtgaagaggctgattgaccaaatggggctcctgaaaatgaatgtcctgcactggcatttgtcggatgatgccggatggcgcatccagattaaaaaatatcccaaactgacatccgtgggaggcaagagaagagatacggagatagagacgtgggggagcggcaagtatgaaggcaggccccatgaaggtttttatacgcaggaacaggtcaagcgcattgtccggtatgcggccgacaggaacataacgattgttcctgaaatagatattccgggccattccgccgccgccatcgtttcctatccggagttgaaattgtccgccaggcctctcgcggaagtgcccgtgagtttcaatgacggagcggcgtttgatcccaccagcgaacgtgcctaccagttcctgggagacatcatgacagagctggcttccctctttcccggaggtatcattcacatcggcggtgacgaggtgcggtacaaaaagtactgggaaggcgtgccccacattgaagcgttcatgaagaaaaagggcattaagacttttcccgaccttcaaatcatgtttacgaatcggatttccggcatgctggctgagagggggcgccggatgatggggtggaatgaaatcctggggtccgacgtacacaatgacggcggccggggagcggcgctcggcaagctggatgcaagtgctatcattcatttctggtatgggtccgataaaattgctgccaaggcgatcagggaaggccgccaggtggtgaattccacttcccacatgacttacattaacaaagggtatgacaagctccctctgtccaagtcctattcttttgagcccgtttttgcgggattgaatccggagcagcagaagaatgtcatcgggctgggctgccaggtctggacggaatggattgcggacgtggagaaactgcaccgtcatgtatttccccgtattgccgcttatgcggagacggggtggacccggaaggaggataaaaattttcaggatttccggaggcgtttgacggggtatgaaaaaattctggatgccctgggcatccggcacggggaaaaggaatagttgaaaattcgccgccggggagaagcgtcctggctgagtcaacagtaagcccgcttgttacttggttaaggattcggaagagttcctgtctgtggcttcttaaggcattccgcccgcgcctgcatgttttccagaattttcagaatataagaacgcgttgtagccgagtgttccgctccgcgtacgaaggaaagccccctgtacagtcctaccgtttccaggcggagattcatatcttctccggacaggtcttcactggagggaggaggataattggaagcggggccgttcagggacttcatctgcatggtatccatattaagcaggcagctttgtattccgttagtgaaaatcaggctgccctgatgatgcttgtcctccggccacagcctgtaaatggtaacggcgcttctccctccgggattgatcaaaatggcggggaaaacgtgtttgccgccaccctttttccggacggtcgcgtcaaagtcgcattctccggaaaacctggtcgtaacacgggaggagatgcatacttcaaaaggtacttccggcggcaggggaatcatggtggaggcagacaggggcgaccccggagggagttccggaatcgggaaggggaacgtaatgatgtcaatggcgcagctgatgatgccgatgatggcgaatagcaggatgcctttgttccggagctgggctgacagcatttttccatattcctccggataatgcctgcctgcggctggttcctgccgcaggtaatagccggtcaggcgtgaaataacggtcagagcggcagccatggctgccagccatgccagggcaaaagccagattttccgctatgggaattgtggtgaaaaagccgaatgttccaataatgaacgccgtcagcaggagaaagacagccaagaaggttatgcagcctaaaggggccgtggagacgggaatccagaaaatgctgcgtttgccgagggctctcagaatcagaatggcaatgcaaaaagagaagatggccagcgttgaataaaaatgttgaaacagataatcgagcatggcatgcgggaaaaacttggataggcaagcggggagcgattccatgccgatttcctgaaaagtatccggaaacaagcagttttgcgccgcgaaacgatagaagctgaatgttgaactcctttattattctagcctttttccatccttgcctgcaagattttttgtttacctgtttctttctatttgtttttgatatgtttaaaaagcattgtcccataaacaaatatggggaaaaaccgactccattttcttttggtgaaaaagatgcggttttctataagcggaggattccgaaatggtaaaactgtgtgttatggataaggggaaaagagtattcctgccatggaaatgttttttcccgtttatgaatgaaaccgctacgccggcttttccttcatccttttcaagagaccgggcggggagaagagccccggccggattttacctgcaagagcgtggggcaggcagttccggacgggttgatgaggaaaaacgcttccctgaagaaactgctaccgctgttccggctttgccggcactttcctgagtttcgcgaagcggggcagggaatattccttttgcatggccgtttctccctggatcaggggaagaacgtaatcaatgaacggctgttccacgccattgccgcgggcgttgatccattcgcggggaacaagtttttccacattggccacttctcccagacctatcaatttagttttgcaggaataaatgccgttctccatgattcgttcaaaggctaccattttatccgtctggccggaaatggcggcttccacggcggcttttcccgccatatacgcttcatcgatatccgtcttggaggcgacatgggaggcgcagcgctggaggagtgagagttcaatgcttctgactttggccccggtttgccgcttgacggattccgcaagcatggctcccaggcctcccagctgcgtatggccgaagacgtccctgtctccggattccgcaacaaagcggccgtctgcatattgcacgccttccgagacggcgaccatgcagctgccgttctgcctgtaaatccggtccacatcctgccagaattcctccatgcggaagggaacttccggcaggtaaaccaagtccggacctgctcccgcatacgtggccagggctgcggatccggccagccagccggcgtggcgacccatgatttccacaatggtgacgcggcccttgtcgtatacgcggaggtcctggtgaacttccatgcaggaggtagcgataaatttggcggcagagccgaaaccggggcagtggtccgtgccgtgaaggtcattgtcaatggttttggggattccgatgacgcggcattcgtaaccggactgctgcatgaatttggatatcttgttgcaggtatccatggaatcgttgcctccgttgtagaaaaagtagcgtacgtcgtattttcggaaaatttccagcagacggcggtaatccgtatcatccacggatggggcggccatcttgtagcggcaggaacccagggcagatgccggggtatatttgagcaattccaattctccggggtcttcccgggccatatcgaacaggcgttctttgagcactccctcaatcccgttggcggctcccagcacgcgcgtgacctgttcgctttgcagggcggactgaatggctcccagtgcgctggcgttgatgacggcggtggggccaccggactggccgatgatgcatgctcctttcaatgggttcatgggcaataatggatgagagagttgtgttgcgccccctttcaacggcgttggaggcaggaaatgaaatgatagtcaaacctatccgcagcccggagggatgtcaaacattattggttttccggatggggctggcggggctggagaaagtggggaagaaaaaagagccggggtatcagtttttttgtctccagagcttttccaatgcggaggcaaagcgtctcctagggccagaattccatgcgtacccagatggacggtatccgtgggatagggggtgcggaagtccacgctgcgcagctggagatcgtctgcggggacataaaccgcattgttgacggagagggaggtacgggattcttccgccacatccttttgcccctgccgcacttcttccctgcccggaaaacgggccggagcgggcacgggaagaacgctgccgtagataaaggccagaccgggggcttccagatccgctctgatgcgtttaatcaggttgttcaggttggcgccgtaagacagagcgtttttgatgccggcaatgtcccttgcgtctccttccccctgttgccacaccatggctttcaggacaggagcatgtctctgttttttcagagcttccattccgttgcggacggtacggatcagtttgacgtattcttccccctgcttatcctgagaagtttttcctgggttccattgccggaaaaggttgcttccgctctgggcgtgtttgatgatggcccatttttttgcgggaattttttctgcaacgctgttcccaggcttagttccacgccaaaacggtcgggggattcggatgccgggttcaagggaacaagctgttctgccggtcctgtccctttgagggagccggaatagtacagaagaatccgtttatccgtcttgaagcagggaggaatgttgttgacatatccttgccctgtggcgtttgactggccgccgataaggatgacgttgatttcatccgcatgcaggggtggcgccggaaagaccgtcaggggagcaaagcagccatgaaaagaggaaaaaacgtgcagagcgtggaagtacggaaacaatcatggcgaggatatccctgatacgttttcggaaagaagattctgtcttctggaggaattcttctttgcctgctgccaggatattttactgttggtgctcttgttcccttgattctttcctttccggaaaaaggcattatgcggaaggtgcgtgcagggaaacggattggccggggtatatttccggaatgacggaaatgctcttgatatttttcccggctgtcagggagcggagcatccgtatgagcttgtgaaccgtttttgtctggttctcttcataataggtgatcgtgggcagcaggcgttccatgaagggttcatacgtcaggctgaccaggctgagctgatccggaatgctcagcgaacgggcttccacccaggaaagaatgggaacgatctggttgccccgtgtggctaccagggcggacatatccggatgttttttaaacgctttggccagatattcaaagaagagcggcgtttcaaacggggtgggtaccaggatgggattccatccctgttccgcaaagctgaaaaaacctttttgcatgagctggtggcccttcaacggatcaggaggcaggcacaggcctaccgttcgatgccccttgttccaaagatgctgcgccgcatgatgcgtggtggccgcccagtggcggtccagatagggaaggttgctgctctggtaggaggtgccgcgcacaatgcaggggatgcggtgcgtcttgaaccagagctgggtttgctccgaggaacggtgaagtatccagcagacgcattcggatttggtaaccagcttggcaagcctcttgtccggattgttgcctaagatccagggagcttcaaagatacggacgctgatgccgtcttcctccagaattttggagatggtatatatttccgccaatacgctttgagccagccttttgaggggctggggcgtcagaaacccgagaatttcttttttttcctgaaccggatggcaaaagatatttttaaccgtttcttcttccgtagttttcaggatgcgccgcggaaccttgatgcgtgggggggcaatccatgcatccctttccagaagggccagggcctttctgatggtttccctgcctacggataacctgtgcccgagttctctttctccgggcaggatattgaccaggctgccgctgagaatcatctgtttgattttattggctactgtttcaaccaatgaagaagctggcaacgaagtcatactcttgtatatacgtatcgcattgcgtgaattcgagccaattgtagggattgcctggcccgcagaatccgaaaggagatctggtgttgttgcaagttgttgatattctgtaaatcgttttaggatttaagctactggtctttttttgatgaggtaaagtgggcggataatgtataaatgatatagtgttatcaatgcattacattcctgagcggtacggcttcaggtggtttgtaattatttttaattcatttaagataaatattttattgcgtattttgttagacagggccatttattacctcccttttctcactttcctccatatttccggcaggaaatgtgcacgtatcagcatggatgacttttctcccgtttccggcactaaatctgcttgatgaaagtgaataccataccgggcgcatcctatgcgctgacttgtacggctgcgtgtactatccatgcgcttcttagcgacgcttcttctctggttatcctggaaacggaaaaccccggacaatatttttttatagctcccactgatacaatagaggtatcagacgaacacgccctggtgacacaaacttttaaagcagccgctccgggattgtctgcccgcagcggcataaggccgggagtaaatgctgatttaaaaaatccgacggtggaaaaagcggtatgaaccatttcttttttctgatcgcccgcgattaagcgcagcgctcatgagcaatccggtcaaaaggttgtttgtccatggtttttcgaacctttacggggagcgggcgggacttcaccgccagatcattgtctgacgcggactgggtgcggaagtccgtctcattccttcctgaaattactacggggagtctctttgagaaatgaagcgttatgactgataatagaaaaccctgggagcgtttagctcccagggtttattgattggtaccgccggtgggactcgaacccacactcttttggaactcgattttgagtcgagcgcgtctaccattccgccacgacggcacgtgaagcgaaagaattaagaggcaagagggccggagagtcaagaatttcctgtggaatatggtgagctgctgaaaaaacggagggatttttctgtggattccctccgtcatgtttccggatggaaataaatgtttggaatgagcaatgcacggcagcgttaacgctttggttgaccatgtgttccttctgttccaggcggtagaaggtttcggctcccaaactctagagatggttcggttcagaccagcgttgacgattgaggtatggtgtcccggccgaacaccggatttcctttttattccccgcctgtgccgcgaacttcccggaagagcttttcatggatgatgaaagcggaaccaacatggcacaagggggatggtacgcttaatctccggcgttttcttttcctgactaacaggagaacctctctccgggcgtttcagccttttttcacggtcaggggcagtcccgccaccatgaagtagacttcatccgcgcttttggcaaggagttggttggcaatgcccagcccgtcgcagtagtgtcgcgtttccgcatctgactggctgatgcccatgccggtttcagaagaaacaagcacccatggcacgggggattggcggatgagctttttcaaagcttctatttcctcaatcagcgcttcctggaacggctcgtagtccgtggggtccttctgggcgtacagggtattggaggcgagcaaggtgacgcattccagaatgacgccgtccacctggtccagcaagccggattccccgacggcagaagctacatgacggggacattccagcgtgagccagctttcaggacggcgttcccggtgcttgcgcacgcggtattccatggagccggccccgggccagacttccgccgtggcgacatacaggattttttccccgaatccggcggctatttgttcagcgtattggcttttgccgcttctgatgccgcccaggacgagcgccatgcgtgcggtattggcgtcagtgtttggtgatgtaacgttcatgggattccagcatagcctggtgggagttcaggaagtcatccaggctgaagacttccagcgtaataagaggggagaaatggaggtcccacatggggtgcagaatggcgtccagagtagcggcaggcatgtggtgcagggatttgtggtcccgtttttccagcccgtgcaggtggcacatgcgtatgtccggcagccagagcggcagaagtttttccggccgcaagccttctttccagacatggcctatgtcaaagcaacgtgaatggggtgtagcagctaccagtttgtccagatagtcggtcggatggcgttccaaattttccagggccaggcattccggtgcggggaggtggggcgtgatttgttccagactccggaggattcgttccgtttcgcattccgtaagatgggggcgcatatcaggaccgggaatatggtccgtgaccacatgcatgacccaggtgtggggttccagttcccgtgtcaggtcaatggcgcgaatgatgttttccgtataacggcggcttgattcttccgtggcgaagccgccgtccgtgggcaggtggacgttccaggtaaccccggcatctgcagcgattccggccagttcccgtatttccgcaggggtaatgagttcctttccgcattctccggcttccagcaggagcagagcgacatcatccgcgtaatggacgcattccctgatggcgggcacgtagtagtccgggatgataaaggaggtgcatccgatgttgaggcctggaacgcggcatttgtgtggagttttcataaagtgcagaaggtgagcaggacgagccattccgtacattccacggtacagccgaatacatccccggtaacgccgcccaggcggcggcgcgcgtatagaagcaggcccatggagccggccagggcggagagcagggcgtacagcccgttccatcctgccagagcgcaggcagccagggtgacggctgcagcagccagggcgtgcccggggcgcgttccctgcttgaacgcttcccccatgccgccggggcgtgcgcccggaaagcgcatggcgatgaatatctggctgcgggcaagcaatcctgccagagcgcacgccgtgagcagaagttcccaggtgccgtgggccgccagagtcgccagggcggctcccttgaatgccaggttgaaaaacagggccgtgccgccgaaggttcccagacgggagtctttcatgatttccagcctgcgttcccgggatacttcaatgggaagcccgtctccgcagtccgctactccgtccaggtgcaggccgcccgtgacggctacccagcaggcacagccgataatgccgcagaccaggggggggaagagcagggttgccgtccatgtcaggccgcccgcaagcccccccaccaccaggccaaccagcggtagccaggcggaaattccgttcaggtcattttgcagcggccacggcccaacgggcagccgggtcaggaagccgaaggcggagcggatggtagtgatgacagccatggatacagggaagaaagggtcagcgcggaacggtgatgtccagttccggcagggttttcatttcagaaagtacgcgcgtggcggcgtccagcaggggaaagaacagggcggcccccgtgccttctcccaggcagaggcccaggtccatgtacatggtgacgccgatgtggtccataatgagcttatgccccggttccgcggagttgtgggagccgatgaagtattgcgccgcttccgggcgaatgccctgggcgatggctgcggccgccccggcaatgaagccgtcaatgacgatgggaacgcgcagggaggccgcccccagcatcagtccggccatggctcctatttccggtcctcccaccttcgccagcacgtcgatggcatcggaagggtctggcttgttcagggtgattccctgttcgatgagttttatttttttgcggattacttctcctctgacaccggaaccgcgtcccgtcacggtttccacaggggtgcccgtgagcacggccacgatggcggaagagggggtggtattgccaatgcccatttctccggcagccacaatgtccagccctttgtttttttcttcacgggccatgtcaatgcccacttgcaggcattccagggcctgttcccgcgtcatggccggctccttgctgaagtcgttggcgccgtgcatgacttttcttttgaccagccccggcagatcgccgaagtcgtaattgacgcccacgtccactacggaaaggcgtgctcccgcgttgcgcgtaaaggcgttgatggtgcctccgccctgaaggaagttgcgggtctggatgtaggtgacgtccgtggatgtcaggctgaggccgtggtcggcaatgtggtggtccgcggcgaacaggaccacggctttgtccttcaggcgcggcgcgggattgccggtcatggcggcaatacggatggccacgggttccagtttccccagggcaaggggaggcttggccagaattttctgatgttccagggccgcttttgcggcctgttcgtccagcggggggatatgcagtttgttcatgatggtcagaggcgggggatgaagagaagaaggagagtgaacgccagcgtacccgtgacggcagtcgtccacatgagccgaatggccagggccaggtcgctggcggaggctttggttctccctgttcctatccaggggtagtttgcaggaattcccttgtaagagaccggacccccgagacggaggcccagcgctccagcgaaggccgcttcgctccatgcggaattggggctggcgtgggcattccggaaggcccatcccatggtgagcgccctccgggcggaggttcctttcaccatcagggcggaaaaggaaatacatggtaaaataaggcgtgcggggatgaagttgagcgcgtcatccgtgcgtgcggcaaaggtgccgaagtgtctgtaccggtcattttttttcccccacatggcatccaggatgttgaaaacacgatgcgccagcgcggcggaagccgccccggaggagcctcctgccaggcagcctgctgatgcccagaacagggtggaaaaaacgccatccgtcaagttctccgccacgctttcaatagccgctctggcgatgccgtggccgtccatccgttccgtatcccgtcccacgatcatggagacggagtgccgggcctctccggcgttcccgctgcgcagggcattttccaccttccgggcatgctcggccaggctgcgcggggccatgcagatgtaaatgaccagaacggacggaatccagggggcccagggggagggtaacaaggaaaagggaaggaagagcgctgcgcagccgaaccatgcggcaatgcaggttgccagcgctgccgccattcccgcatgaaaagttcctccccacctttgcctcgccagtgtttccatgcggtgcgcgcaccggccgatcaaacagacgggatggaacctgttgggcggttctcccgccagaatatccagcaggaaggccgcaggcaggatgaacgggcacgggaacatgggtcagcgtttcagttggagagctcggtaaatggttttcaggtccagatgtttccggaccacgtccgccaggcggtccagcgctccgtccaggtcataggcggtgtgcagggctgggttggctttcagccctgaatctttcctgaccatgttgatgaatgcgcggcggaattggtctccgtccagcatgccgtgcagatacgtggcccagatacggcctttgccgtagccgcagggggagccgtcttcccggaacatgacgggggtggtggattcttgatggatggtgacgccatggtggatttcataacctgcggcgggaacgggcagcggcgtgcttgcccggcgcacgttgatcagggttttggctgaggagaaggtggtggaaagttccagcagccccagtcctggcgtgcgttcctccggggattccatgtgcagcgggtccagaatgtccgttcccagcatttgcagccctccgcagacgcccagaagccactttcccttttcggcatgacggcggatgggttcttccagcccggcggaacggagagaggccaggtccgcagccacgcttttagtgccgggcagaatgaccaggtctggatttccccattcctcccgtgtccgcacctggcggagccggacgtccggctccgccgccagaggggcgaagtccgtgaagttggagacgtgggcgggcatgactacggccacatccaggcaatccgcatgtttcccgtgctccccgtggccagggggcagcgtggcgcggtcttcttccggaatgttgatgtcccacatcatcgggatgacgcccagcacaggcttgcccgtacggttccgcatgtagctgtgcgccggggccagcagatccggatctcctcgaaatttgttgaccacgaaccccgccagcagttctttttcccacggggcgaatgtcatccacgttcccagaaaggaggcgtacactccgccacggtcaatgtccccggcgagcagaaccctggcacgcgcgtagcgggccatgttcatgttgaccacgtctgctgatttcagattgatttctccggggcttccggccccttccaggcagatgagttcatattcatccgccagggaatcgtatgctttgcatacgtccggccagaagcgccttttagccgtgaagtattcccgcgcgtccatgctgcctacgggccgccccatcacgatcacctgggagccggtattggaatggggcttgagaagaatggggttcattctggcatccggatcaatgcggcaggcctgggcctgcactatctgggcgcggcccatttcctctcccagagcggttacgccggagttgagagccatattctgcgccttgaacggagccacccggtagccgtcctgaaggaaaatgcggcacagggctgccgtgagcacgctttttcccgcatcggagcaggtgccctgaatcatcagggccggtctgggcgatttacggataatggaagggccgtttcccgccagttcggcgcgcagagcttctgccagcagggcgtgttcctccggcgtgcggacgccggagcggaaccagccgcccgtttccagtcccggataattggaacagtcgcgcagcgcgatgccgtattttttcaggagccgggctgccaggccatgaggcgcccccgccaggcggaagagcaggaagttggcctcggacgggagtacggcggcacccggcagggaggaaagcctgcggaacaggtcatcccggcgttcccggttccgggcgcgttccctgtctgcccaggaagaggggtgtttcagcacggccttcgccgcttccgccgcaaaggcattcacgttccaggcgggcagggattgccgcagccgctccgcgagcggagcggcacagatggaaaaaccgcaccggacgccggccatgccgtaaaacttggtcagggagcgcagaaccaccaggttgggaaggagagccgcttctcggagcagcgatcccgctccttctgcgtaatccatgaaagattcgtcaatgatccagaggacttcggggcggctctggacagccctgcgcagggccgctgcgtccagcaggctgccggacggattgctgggatttgccagaaaaacagcgcttccgtctgcggcctgttcctccagatgacaaagagacgggagaaaggaattccgttcctccgtccggatggaaagaacatccatgccgtggcgcaggcaggccagcctgtattcggaaaaagcgggttccggaatgacggcctgtttaaggtttaatgcgcgcggaagagcgtgaatgagttcattggccccgtttccaaatacgaagcagccggaaggaagcccgtaatgaaccgccgccagttctcgcagatccgccgcatccggagaagggtagggtactgcgttttccatggccttccacaatgctgaagcgatgaactccggcataccttccggcctcaggttgacgctgaagtccaaaatatcccgttccgggcggcaggcctcctccgccagggattttaaatctccgccatgtgaaaaaacgttcatgccacagtaattggaaccggcgtaccgaagggttgtccgcgccggagaaagaaaggaagcgccttgcaagttcggaattcctcgtagccggaagcttcgccggagacgggaaatcttccctgttgcgggaacgtgggaacaaggagcgtcatgagcgcatcatgtcctgtgtgcgccgggagtgacaagacaaaaatggaaagccccgtgaggaaaagagggatggagagcaatgcgctgaaaagggaaaacggctgcaattcatctggatgttcaaagaaaaatttttttgtcttgtcataccggtctctttggtattttatccgtcccatgaacccttatgggaagggttacagacctcagggacgcccgtagccgggcaggaaataaatggggaataccggtgtgagtccggagcggtaccgccactgtaagcgagcctgcctcgcaagccaggaaaccagcctgtgaggttgtccaactgttcggcgagttaccgaacgtaaggcactacaaccatgctttatacgaagaaagcccttcaaatgggcgcaattgctgttggccttgccgcattcgcaggccagtcctctcttgccgagtccgctaaaaaggaagactccaagccctccgtcaggacggaaaccatgcaggttatgccggaactgactatggcatcccactttgtgggcgtgccgtacaaccggtctggagtgtccgtttccatcatcaatccggaagaattccagaaggcgggcattgaaaccctgacgggagccctttcccagacgcccggcgttttcacgctggacggaggcggcacctggcagcgcggttccgtgagcaacaccgtcatccgcgggatgaacaaggatacctacaccctgaccatggttgacggcatgcgcatcagtgatgccaacatgtccggcaacaagctgctgggcatcaccaatctctttacggtgggcaatgtggaagtggtgaaaggcgcgcagggcgccgtcttcggttccggcgccattggaggcgtcgtcgcgatggatactccggagggggaaggcgatcccgtaacccggatttttgcggaggccggttccttcggctctttcaacagctacatcacttcctccggcaagatcaagaagctttcctattttgtaggcgttgggtttgaaactacggaaaacgatccgtcaatctatccgtccatttatgacaacaggacaggcatgaacgatttccgccagtggcaggaagccgtgcgcctgggctatgacatcaatgacaaggtgaaggtgagctttacctatcgccgcctggattcctactttgaatatcccacgccttatgtggattataaccagtggccttccgttccggatccccatctgtacaatacggaagacaagaaccgcagcaatctggtgacaggacgtgtggatgcggaaatttccaagctgtggtccaccagtttcatggtggggcattacaacatggactattcctgccatactcccggatttgatttccagcccaatgtgatgcgcaaccgccgttttcaggcggagtggcgtaatgcgctgacgtggaacaaggaatggaaaaccatcgccggcatggcctgggaccgttccgactacatgagcgaaaacaattacgttgccaaggatgaatggcagagcacgcttgccttctttgcggagcaaatgtggtcacccacggacagctttgacgccagcgtggccctgcgcctggaacatgattccgtctggaacaatcattttacgtggcgttattccaattcctggaaagtgacgggcaaggattcccccacccgtattttcggttccgtgggttccggtttccgcgcgcccacctattttgagcagtatgcggccaattatggttatgttggcaaccctgatctggatgtgtccaagtccctaggcggcgatctgggggtggaacagcgtctggcggacggccattatgcttccgtgacgggcttctggacccgtatcgacgatgaaatcggcaccatgagcgtaggcacctggcctaattcctataccacttacaccaattattcccactgcacttcctacggcgtggaagtggcgttcaagggacagttcaaggacgcgtggaacagcggctattatgccaattacaccttcacgatgcccaagcgcgattccatcggcaaatacgaaaccattcagatggccaataccgcccgccacaccatcaacgcagaggtttattcctccccggttgaaaagctgacggtcggcttcggcgtaacggccgccatgggacgcacggattacaattatgcccgtctggacaatttctttacggcgcgcctgtttgcccgttaccaggcaacggacaatgtgtccctccatgtgcgtctggaaaacctgtttgaccagaagttcatcatgacgaatgattataacttcggcccgcgtgaagcccgtggattcggaatcttcggcggtgtgacggtcgaattctaagttcctttcaatattaattgttgattgctcccccatcttccgtcttgcggactgtttcaggcgaagtgaacggttccgcgcggaagatgggttttctgttttccgtagtttccggaatcggttaacatgtggcggccatctgagttgtgttgcgctggatatccatactgggggcattggccctttccgtctttctgggaggtgtcttttacttttcccagcgtgagaagaatgtttggcatgaattttccggccggatggacggcagggggatgcctgccgtatttgacggttttgtggaacgctggaacagggccgtggaacgggagctgcgccgtgaattggctgaaggggagaggaaggaaaaacttctggtcgtttcccgcggggaaggggacggccggcgtttggcggaacaggctcgttccgtggaacgcatcaggaaaaggctgttattgaaagaccatatccgccttcttcctctggaagacgttccggacggattggaatggcaaaccggaatggaagagccggatgtgggtgatccgcgcgccgtcaagggtggaagagtccggttgtggatcaatactccgtttcccggaactttgcgtgctttcgggccgggaagtgaaaattttttcaattactccgccattgacaacgtgtggcttcccctcgtggggcttcatccggaaaccttccgtcccattccgggcctggcggaccgctgggccttgtccgcagacggaaaaaccgttttttatcatctggatccggaagcggcctattcggacggacgcatcgtgaaagcgcaggattttctgctgaacatttgcctccgtacgtccggttttgcccgggatccgttctggacaaccctgttccgttccatgtatgatcagattacggtatacggggattccgtcattgccctgacgctgccgtcccgcgggccgctgctgccttacatggcctgtgcggattttcatccggcccatcccggtttttaccatgatttcaacgctctgtttctggaacgctaccagtggaaagtccctccaaatacgggtggctacatggttgttcccgctaaaatccggataggagaaagcattaccctggcccgcgtgaaaaattggtgggcgaaggacaggaagtattaccgccattcctgcaatgcggaccaggtggaacatgtgtttgtgaacatggaaaacaaggcggttgaaatgttccgccgcggggaactggacatcatgaacgtccgtaagccggaggtgtgggaaacggggctggaactgccggaagtgcaccggggctatatagataaatacagtctggaagccaattacgcctgtcccccgtacggactgtatctgaattgctcggacaaactgttgaaaaatccggatatccgccgcgggctggcgcattccgtgaacatgggcctggtgattgatactttgttccgcgggaatatgagaaggctcggttcctacatggaggggtacggagacctgactcttccgctgaaagctccggaatacagcaagaaaaaagccatggaatattttgcccgcgccggctaccgggaaatggggactgacggcgtgctgaaaaatgaacggggagaacggctggtggtggaactgacgtttgcggattcatccgtcctgatgaccaacgtctgttccattctccggcaggaggccctgaagtgcggggtggacctgcgtctggattctcttacctacagtgtctgttcccgtaaggtttttgaaaaacggtatcaggcggctctgtgggcgtggccgctgcagacgccgttcccacggctgtatgaaacattttcttccgaactggcgtatgatgcccgcggaaatcccgtaggcaatacgaataatattatggctgtgtcggacgctgaactggatgccgccctggatgcggaacgcaatgccccggataccggttccctgaagctggctcttcaccgtgcccagcagcgtctttatgaactttgcgtctggattcccggctggagggaaccctacacgcatgtcgcctgctggcgctggatacgctggccggaatctcccacccggttctgttcccccagaatttacaatccgctggaatcgcacctgtactgggtggatgaagaaatgaagaaggaaacgctggaggctcggagccgtggcgtaccgtttgaagaaaagcatcaaataatatatcttgaaagacaggatggtgccgttccgtaataaaaccgggtcaccgtctcctttttaaattgaaaggaggtgatttttcatcataatctccttcgcatttaccgtaattaattattaattccataatcatgaaattatcctttttctccgttctgcttctggcagggcatctttgcgtggctgctcccatgcctctgccggaatccaatgacggagccaggcatgtcttctctactaatcaggaaaattttttgatggacggaaagcccgtcaaaatcatttccggggaaatgcattatcctcgcgtgccgcgccaacactggaaggacaggttccagcgcataaaggccatgggcatgaataccgtctgcacttatctgttctggaacgtgcacgaaccggaacccggcaaatgggacttctccggcaatctggattttgtggaattcatcaaggaagcgcagaaggccggcctgtgggtcattgtgcgtcccgggccctatgtgtgcgcggaatgggaattcggcggatttcccggctggctgctgaaggatgaagatttgaaagtccgttcccaggatccccgcttcctggaaccggccatggcttatcttaaaaaagtctgttccatgttggaacctctgcagattaccaagggaggccccatcatcatggcccaggtggaaaatgaatatggttcctatggttctgacaaggattacgtgaaaaagcatctggacgttatccggaaggaacttccgggagttgttcccttcacgtcggacggcccgaacgactggatgatcaagaacggcacgcttccgggcgttgttcccgccatgaatttcggcggcggagccaagggcgcctttgcgaatctggagaagcacaagggcaaaacgccccgcatcaacggcgaattctgggtgggctggtttgaccactggggcaagcccaagaatggcggcagtacggaaggtttcaaccgagacctgaagtggatgctggaaaataacgtctcccccaacctcttcatggtgcatggggggacctccttcggcttcatgaacggggcgaactgggaaggcgcctacacgccggatgtaaccaattacgactacggcgcccccatttccgaaaacggaaccctgacggaccgctaccgcaccttccgccagactattcaggattattacggtgatacgtacaagcttcccgaacctcccgcccagccggaaatgatggagctgccccccatcacgtttacggaaacggccggcatgttctcccgcctgccgcagcccgtcattcgcaaggagcccgtccacatggaagccctggggcaaagcctgggcttcatcctgtatcggacaaaggtgcaaggcccggtgaaaggagaactgaagatgaacaacatgcaggaccgcgccatcgtttacgtggatggcaagaggcagggggcggcggatcgccgttacaagcaggattcctgtgatgtggtgattccttccggacttcatacggtggacatttttgtggaaaacatgggccgcatcaacttcggcggccagatacagggcgagcgcaagggcatccgagggcccatcacgctggacggcaaaaagctggaaaacttccttatctacaacttcccgtgcaagggagtggagcttcttcccttctccggcaagaagccggcgggcgaccagcccgtgttccaccgcgggtatttcaacgtttccaatcccaaagatacctacctggatatgcgggacggctggaagaaaggcgttgtgtgggtgaatggccgcaatctgggccgcttctggtttatcggctcccagcaggctctttattgccccggagaatacctgaagcctgggaaaaatgaaatcgtggtgctggacgtggacggaggtttcggcacggtgaagggtgtgaaggaagccatttatgaagtcaacagggaccccgccatggcggatgtcttccgcgtaggcaaacctgtggcccccgctgccggccagctggtgcacaagggttccttcgccaagggggcagatcagcaggaaatcaaattccgcgctcccgtccaggcccgttacatcgccattgtcagtaaaaacgcccatgacaacggcccccatgccgctattgcggagctgaacttcctggacgcctccggcaacctgcttccccgcgaacagtggtccgtggtttatgcggattcccatgaaacgacgggggaagccgcccaggcgggcctggtgatggacaaccagcccaccacctactggcataccaagtggcagggggacaaccctcagcatccgcacatgatcgtgctggatctgggcaaggtgcagaaactttcaggattccgctacctgccgcgccagaacagggaaaacggccgcatcaaggactatgaagtctatgcgtctcccaagccgttcaagcctgccaagtaaggttctctgaattgttgaacttttcagggccgcttcctccaggatgagggggcggccttgttgcgtccggacatcccggaagaaacagtcctcctttgcccggataagagccgttccggtttaaagatgcgtatcagctttccgtccctttgtttcctgctgttgtgcgggccggcattccatgcgcaaaaaaggcggctccgcagtataacggagccgccggaagaccgtaataaacctgataattgtttgttagaaattccaggagaagcccagcttgatggtgtggtagccggggtcattgtagccctgaatctggtaatattcgtagccgagcacgaagtccgcgctattggagatgctgaacttgaagccggcctgggcagcccaggaaaacttggtggaggaaatggttcgggaacggctgccgtcttccagtccatgaatggtggtcttcacgtcgccgtaagtggcgccgactttgccgcccagatagaacatggtgtagtcgccgatgggaaggttcagcgtgtaaccggccatcatcgggatataggtggaacggaggctggcggtataaggcccgctgatgcccaggtcctgcacgctggggtggtgggaaccggccaggatgccgccgttcagggaaatctgatgaacaatgctgccggtttcaatatagttgaaaatgctcagattgccgccggccacgttgggcatggcgtctttggtggcgattccgtaagccccttccagggacatgccgaactggccgtcgtacttgtcggcatgataggcgctggcggaagacacggaggccgcaagggccaaacctaacagtatagtcttgttcatatggggataaatggtgaatttaactgtggtccattcttggcagttttctcttttgaagtcaaacatgaaatgtcaaatggacgcgaaatcctcaaacccggggagatgaagttgccagaacgctcccggtggggtacattctgcgccatggaacaacaagcgtgtgatttgctggtgaccgcttcccgcatgctgggcggagcggaacagtccggcgctgccggagatgcggccgtcgccgtccgggacgggaaaattctggaaacgggaagcgccgcagaactggaagccaggtggacgccctccgttcgcagggatttggggaatgcgctgctgatgccggggctgattaatgcccatacgcatgtccccatgacctttttgcgcggttttgcggatgacttgccgctgatggaatggctgaccgggcatattttcccggtggaagcccggctgacggataaaatcgtctccctgggggcccggctgggcatgtatgaaatgatgcggacgggcaccacggcgtttgtagattcctacctgttggaggccaatgtcctccaggaagcggaacgcatgggaatgcgctgtgtgggcggggaagtcgtttttgcttttccctctccggcatacggggggtgggatggtgcggaagccctgtaccgggagcaggcggaacgcttttccggccgcggcagggtgcaggtggccctgatgccgcacagcgtgtacactaccagtgacgaagtgctccggcgttccatgaagctggcggaggaactggatatgatgctgcatatccatctgtccgaatccgccggggaagtggagcagtgccgttccctgcacggaggaaggcgccccgtgggctatgcccgcgatatggggctgctgaatgaacgcgccgtgctggctcatatggtggacgtgacggatgaggaactggagctggtggccgcttccggggcggcggttgtccataacccggtcagcaacctgaaactggcgtccggcttcgcccgcgtgcgggatatggtgcaggccggcgttcccgtctctctgggaacggacggagcgtgcagcaacaacagtctgaatatgtttgaaacaatgaagctggccgctattcttgccaaggggtacagcggtgacgctactgcgctccccgccatgcaggcgctgaagatggctacggcggagggcgcccgcattttccggacgccggggctgggaacactggtcccgggggctcccgcggatatgatcgcgctgaacctggatgaaccgaacctgtgcccgatgttcaacgaaacgtcccatgccgtttatgcctcttccggcaaggattgcgtgttcaccatggtggaagggagaattttgtatgatcatggaatttacacggacggcctgtatgcggataccgccgcggaaatgcgggatctggtaaagtgggtgaaaaacagtgattaagtattggaaatgagcgaataaaggcaggttttcaacacatgctttaatcacccttcccttacctctgctatctgtcggccttccgaaccggcgcatgctcatattccttctttacccgcatggggggatgcctttatagtaatttcatgcaatatgatctcatcgtcattggtggaggccctgccggctatgtgggcgccatccgcgccgcccagctggggaaatccgtggtgtgcgtggaacgcgagcgggtagggggcacctgtctgaactggggttgcatccccaccaaggcgcttctgaaaaacgcggaagcctacctgactgtaacggcccgtgccagggaattcggcatgacggtggagggcgtcagcgtggattggagcgaagtgatcggccgttcccgcaaggtcagcgaccgcctggccgggggcgttgggttcctgttcaagaaaaacaaggtggattccgttacgggggaagcctccatcatttctcccggcagggtggaagtaaaggccgccgacgggacggtgaatgttctggagggaaagaatatcctggtctgtaccggctgcgtcacccgcacggtgcccagcctccccctgaacggcactaccgtcatcggctccagggaagccatggtgctggaaaagcggcctgaaagcatgatcatcatcggttccggggccatcggcacggaatttgcctacatttacaattcattcggcaccagggtaacgcttattgaagcgcttccccgcatgcttcccaatgaagacgacgactcctgcatgacgctggaacgcgcattcaagaagcagggcatcaaggtgatgaccggagcctccgtggaatccgttacggaaacctgtgacggacaggtcaaggccagcgtgaaaaacagcaggggacaggaagaggaaatcacggcggatatctgcctggtggccatcggcgtgaagccggttgttcccgccgcgcccggcctggacctggagctgacggaaaagggattcatcaaggtgaatgaccgctatgcgacttccatacccggcgtgtatgcggcaggcgatgtgatcggcggcgtgctgctggcgcatacggcttcttttgaagctgtgcaggcagtagagggcatgtttaatccggactatcagcccaggcaggtgggctttttcccgagctgcacatattgctacccgcaggtggcttccgtaggtaaaacggaacgcgccctcaaagaggcgggcgtggaatacaaggtggggaaattccccttccaggccattggcaaggctgtagccgccggagaaccggacggtttcgtaaaaaccctgtacggcgccaaaaacggagaactcctgggcgcccacatcgtggggccggaagccacggagctgattgccgcgctgggcatcggcattcaggcggaactgacggacgaggacatccacgccaccattttcgcccatcccacgctgtctgaggccatccatgaatccatgctggcttccgagggaatcgccatccacatgtaacggttttcaatggaagggcccccatccggggctcttccattcattcctttgtcatgcaaacgggtgaatgacaatctgcgttgaaaaaagacgttcaaggataaacttgttgatgagggctgcagcgtcaacaattcccgtaagtttatcagacaggctttaagcaggattgatagtcaatgtagtagattgactgtaagttttggaaagccgcggtttgcttatttatatcatcaaggaacggggataacctggaaaccacaggcaacagggccatttgcggcacgagtggacggacagccgcgaaaacggagcgggagtaagccaaaacggctcatgccgcattgaagtacggaaaagaaagggcaaaaagattttggaaacagttccgaaacagttccacttcagcctctgttttcgttttttatttgcgtgatgaatgggaagtgtttgatactaatttatggggaaaatatatttataacgtatagataattcctcgcatttatttcttctccaatattttctgttttctctttaccgggtgtctgatgacagttttcagtttgcccacatcacatttgcgtggatcggaaagataaatttcgtgatgataacgagtatcggtaatatcgatctcatatccattggcatttgcgtattcttccatctggcggatggtttcgggttcgttatcataagagccgaggtgcatgcattgaacgcaatcgccttcttcataggtaagaaaatccaccgttgaaaagtccttctttttctttttggttgcttcctcgattgcccactcaagatcttccttagtcacaaagtctggtaaacggataatagaaataaatttaaaattttctttatggccatagtccattccatcgctgccattttgccaccaaaagccttcaagcggtggaacaacatattcgaaaaagcctttaatcttatgagaacccttatagctcatcttgatagtgtaggcaattccgtacagcagttcaatagagcgctgatattctccaccctcttcgttgggattccccttgccgcgaactgctatgtaattcattttaggaatagtaacgattgccggtttgtttttcggcatataaaattccttgtattctttcttataatcaaaagccatgcttgacactccctgaaatcatttttatgtattatgccatttacgaatttttcaaaagtgaaaatgtataaaaatctggtgcgcaacagacgtttttttgaaaatgcagcggttctggagtattgaatttttaactgtgatttactgattagtttaaccaatttaaatagagcacactctccgtcacaaacaatccgtgtttttatacactctgactatccagcccgttaagcggcgggtagtatttttccgcaaaaagcgcggagccctccctccttaaaaatttttccccttcccataaaaagcgtctcctggcaaaagacctgaggggcatttcctgagtatctggaacatcagaaaaagatatttgttttttatttctggcctctaatctttttcccttcggcgtctcataactcgaacatcgggttttccacggcgttttttacggtaataaggaattgctcggcctgcttgccgtccaccaggcggtggtcgtaggaaagggcgaggtacatcatgggccggacgacgatttggccgtcccggaccacggggcgttcctgaatggcgtgcatgcccagaatgccgctttggggagggttcagaatcggggtggaaagaagcgatccatacgtgccgccgttggaaatggtaaagcatccgccttgcagatcctgcatggacaggtttccgctacgtgctttttccgtcaggacggcgagttcctgttccagttccggaaacgttttccggtcacagtcccgcagcacggggacgacgaggcccttatccgtgccaatggctacagagatgtcatagtacaggttttccacgatgtccgcgccgtcaattctggcgttgacctggggcacttcctgcaaggccttgactactgccttgataaagaagctcatgaaaccaagcttggttccgtgccgttcccggaattctgcatggaattgtttgcggagttccatcacggaggacatgtcgcattcgttgaaggtagtcaggatggccgcctggtgctgggcctctaccaaccgtgccgcgatggtacggcgcaacgggctcatgggttttctgatgaagcgcggagaagcctcctttcctgttttcccattttttccggaggttgtctgatccggtgaggatgttttcttttccggcttttgttccgcggcgccagtcacaggtgaggagggaccggaagcgggtttctcccgcgtttccagtggtacggagggcggtgcggcggaacttccgtcaaggggggaaatgcggcctaaaaccgcgccgatgggggcttccgccccttccgggacgaggatttccagcacgccgctttcatccacctccaaatccgtggaaaccttgtccgtttccagcgtcaccagcgtatcgcctttggctaccggatcgccggcgttcttgtgccacgcggctacggtggcggaggtgacggattctccaaagttgggagtcaggatgtcgctcatgggaggaagatgggttcaggattgtgcccgcggcccgaaggcagcggcgagaagtcttttttgcgcggcggcgtgcagggccttggctccttccgcagggcaggccatgggcggccgtcccgcatagcggaaggaggtggcgaagaggtgccccagcctgttccgcaggtggccccaggcccccatgttggagggttcctcctggcaccagacgaagtcgcgcactttctggtagggtgccagcaggaaggtgagctgttcccgggccagaggatagatttgttccagacggatgattaccgtgtctgcaatattccgttccttccggcagacggccaggtcataataaactttcccggtgcagaagacggcgcgcgtcacctgatccggcgcgggagcgtccgggtccggcagtacttcgcggaaacgggagggggccagaaattcccggtgcggggagacggcatccggacgggagagcaggcttttgggcgtaaagacgatcaggggcttgtgcagatttcggtgcacctggcggcgcagggcgtggaagtattgggccggggtggtggggttgatgacctgcatgttgtcgtccgcgcaaagctggagatagcgttccatgcgggcgctggagtgttccgagcccgccccttcatagccgtggggcagcagcagcaccatgcggtttttctggcgccatttggcctccgcggccgcaatgaactggtccacaataacctgtgctccgttggcgaagtccccgaactgggcctcccacatgaccagagcgtccgggctgtccagtgcgtagccgtattcaaagcccagcacggaggcttccgacagagaggagttgtaaatgcggaacgcggtagtgccgtggttcagcttttccagaggagtgtacagggagccgtcattgaagtcatgcaggacggcgtgccgctgggagaaggtgccgcgctgacagtcctggccggacaggcgcacggtgtggttttccgcgagcaggctgccccaggccagggattccgccatggcccagtccagcggtccgccttcccggaaggcctccctgcggcgagccaggaagcgtttttccagcgtggggtgaggcgtgaagccgtccggcagttccgtaaggatatttccgatgcgctggaacaactccgggctgattcccgtccgtatgctggtacgcgggatgggcgtttcatccgcatcctgcgcggtggcgggcaggaggtagtccgcggaattttccttcatttgcaggtaggcctgttccatgccctcccaaaggtctttcctgatgtcccgctcctgctgttccgtcaattccccgcgttccctgagcgccgttccgtacagggctgcggcggtgggacgcgcctcaatccgcttggtctgcatgggtgcagtaaaggcggcctgatccgtttcattgtggcccagacggcggtaacagtacatgtccagaatgatgtcccttccgaatttctggcggaactggagcgcgaagtccgccgcccacaccaggtcttccgggctttctccgttgatatgcaggatgggagactggagcatctgggccacgtccgtggcgtagcgggaggagcgggcttcgtccgggccggtggtgaagccgatctggttgttgatgacgaggtgcacggtgccgcccgtgcggtagcctttcagcagggaaagattgagcacttccgccacgattccctgcccagagaaagcggcgtctccgtgcaggacgagcggcagcacatgcttgcgttccgcgtcttgcaggttgtgctgcatggccctggctctgccttccaccacgggatacacggcttccagatggctggggttggaggagaggcggatgtggaggtcatgcccgtccacgtggcgcgtggcggcgtagccgaggtggtatttgacgtcgctcctgccgatgggggattccggaaggtagtccggcgtgaattcgtggaagatggttttcagcggtttgtggaggatgttggcgagcacattcagccttccgcggtgggccatgcccatttcaatgtgggagactccggcggcgggacagcgcttgatcatggcgtccagcaggacgatggctccttcccctccttccagggagaagcgtttttcccccatgaagtgcttgcccaggaattcctcaaacagttccgccctgcagagatggaagaaggcttctctccggacttccgggccataatccacgccgtttgcccggagctggattttttcttcaatccaggagcggattcccagattgtctatgtggtggtattcaaagccgatggctccacaatagattttttgcagccgattgatgatttcacggagcgtgagtgtccctccgtccatgaaggtgccgatgttgacgggctggtccagatcctcttcttggaatcccatatcctccggggtgacggggaatcggggccggttcggcggctccagcggattgaagcgggcgcattggtgtcccatgacccggtaggcccggatgagctggctgatgcgcccgcggccttccgcgctttccggaggaacggtgtaaagggacgtgtccgcatcggtccctgtgttttcttttttcccgggggcttctccgctccccagttcgtagccctcgaaccaggctgcccagagaggatctacggacaggggatcgtttttccatgattgatggagcaccgtaattttctctggagggagtttggagaagattgaggcatgcatgcggcagagcggatggtacggggcgttttcagttctctgatcgctatttttgcccgcagggcgtcaataactgtgttcgttgagctgaacttttccacggaagacccagtaaatggcggcggaataagccagaacgagcggcacgcccatgatggctatgtatgtcatcacgaccaggctttcccgcgtggatgagccgttgacgagcgtcagggagtgttccgggttgggcatggagtaaagcaggttggggaacatcgctgtcccgaagagagccatcatgcagcccatggtggagcaggaggcgacgaaggcccagcccggacggttcctgtggatgaagagccagatggacgcgatggaaatgaccgccagggcggcgatgccgtaaatccagggggagcgttccagggccgccgctacgtgcggaacatacagcagggtggcagccccgtgcaggatgatcaggacagtgaagatgatgacgcagggtctgagcagtttcctgatttgttcctgaaggctgccctgggttttcatcagcaggtagattcccccgtgcatggagaacagggcgaccgtcgtcagccccagaagaacggaataaggattcagcaggctgaggaatgttccggtgaagtttccctgctcatccagaggaatgcctttggtaacgttccccatggctacgccgatgagcagagccgccagaaggctgctgatggagaaggtggtatcccatcccctgcgccaccatttcatgggctgcttgcttctgaattcaatggacacggcgcggaagataagggtaaggagcaagagcatgaaggccaggtaaaacccggagaagacggaggcgtacacgtacggaaaggcggcgaagagggcgcctccgcccgtgatgagccagacttcgtttccgtcccatacggggcccacggcatttagtgtgagtcttctgttttcatcgcccttgatgaaaagctgaagggcgccggttcccaggtcaaaaccgtccagaatggcgtatccggagaaaagcacgccgacgaggatgaaccagatgatttgcaggtctgcgagagtgagattgtccaacatggttttaaaagaggggtgaagattagtctttgacaaaaggaacctggagtttgccttccccggcgccgtcgtcttcgtcagtttcctgatccggacctttgtggattttatgggtgatttgatagaggaagagggccagcagcagggcataaatgataaagaacatacccagggaggaaaaggcttctgccgcggtgagggtgggggatacggcgtgttccgttctcaggatgccgtacacaatccatggctggcgccccagttccgctacggcccagcccgcctggttggctatttgcgggcccagtacggagaaaacgaagcaccagagcagccagcgcttctggaagagccagccctttttccagccccacaggcccaccagaaacagggccgctagggcgcagccaatcaggatcatgagatggaaggagtaaaagacgggcaggatgggagggcgttcgtcctgcgggatgccgttcatgccggtgatggccgtgtccaggtcatgatgggtcaggagggtgagcaagtatgggatggagacgcccgtcacttcatgagtggacgggttcatccagccgatgagatggagagcctggggagcgccggattccatgacgccttccatggctgcgaatttggcgggttgatggatggagacttctcgtgcgctggaatctcccgtgatgcccatgccggccacgccgatgaggccgatgaccaatgccaccttaaaacttttttctgaccctccggtgaagcgttttttcaaaatataccaggcggagacgctgaggacgagcgtggctcccgccagccagcagccggagagcgcgtgcgtcaggcggtccacggtggatggattgaaaacaacgtcatagaagctggtgatatgggcctggatttttccgtttacttccaccagcttgtatccggcgggcgtctgcatccaggagttggccacaatgatccagatggcgctgaaatgggcgccgagagcgaccatgcaggaggaaaggaagtgcattttgggacccaccttgtcccagccgaaaagcaggatggccagaaagcctgattccaggaagaaggcgaaaatgccttctgccgccagaggactgccgaagatgtcgcctacgcagcgggaataatccgcccagttggtgccgaactggaattccatcacgatgccggaggctacgccaagggcaaagataatgccgaagattctggtccagaatttggcctgcttgtggtagaggtcattcttcgttttcagccacaggccttccagggcgaccagaaccacccccaggccgatggtcatcggcgggaagatgtagtggaacatgatcgtgatggcgaattggagacgggataataagaccggatcgtccatgattgattggggatgagtggatgtttatggaacaggaggacggcagccaaacaccgataccttcatactttatacatcccaagagaccctttgttcaattattttccttttccgtggataactttttagattacgtctagaaaagaaaggcttaacactggatgaacacgtccatcccttcttccgccagagcaaaaagagccatcatgtccctgggagaaaggcgtatgcagccatgggaagccggggtgcccagcagttccgtatcgttggtgccgtggatgtaaatatagcggctccgggtattggcgttgtgcggttccagtccgtccagccacagaatgcgggtcaggatgaagtcggaatgttcattcagacttttcgggatggcggtgggatagcggcctgccggaaggcgtgagatgaaaatagtgtcctccggttctccgtctccgatttttttgcagatgcggaaatgacctgtgggggttttcccggaaccttcttcatggcctgtacctgccttcccgctggaaacggggcattggagcaggatttttccggatttttccagcaccagttcctggcggggcagattaatgcgtatggaaggggaagccatgacgggggaaggagtcaaagatgttgctactcctgttgctccatccgggcaatgatggcctggatggcggttgtcaattgccgcgctacattgttgtaggctgtctgtccgcagccgatggggtcggcgatgccgcggttgcccgtgtagcaggtgaccagcctgaccttgtccgcatgttcggggaaattggcaagcagggcggccaggtggctttccgtcatggcgtagacatctgtggcgtttttcatcagttcatccgtaacagggcggctttcatggctggagagattgacgccatgctcccggaggacgtggagcgtttccggactggctgcctgcccgggccatgcggctgttcctgcggaaccggcctgccattccggatggtgcgcggaaagtttccggaacaggccttccgccatggggctgcggcaggtgttgccggtgcagatgaagaggatgtgtttgcgctgtgtcatgagtcggggcgttctcttttggagtgatgggggataggtacttcgttgggttcctgatacaagttgtccgggggcagcacatggccggcgccgctgccttccgacgaggggggggcgtcgtcttcttcatcttcatcctctgcatcgcgggaggggggggaaagctgggggaacagactgcacgccagggctacgcacagtaccgccgttatgggagtcatgacggggaaccatgtatcatgagcggaaaacaggtaccatgcaatgaagggaacgaacaggatacagaggccccaggtgatgaagcgccctctgcgttgaaaacgcaaagcccatacggacagaagcaggacgtccagcacgatgatccattgtacccaggcgggggctatgggaatcaggacggcaggggcaggggcaagcgctcccatgatgctgcggacagtttgcgccgccagaagggattgcgcgtccggcgtgtcggaaagggcggatggttcggaaacgagtaccgcatccgcagaggaaagcagttttctgacggcagtagtatccggcggacgcaggccggacatgacggggacgatcacttccttcgtgtccagaatggtggggctgctgtttgccgccagggggatgcggccgtttttatccagaggaatggagcgtttgccgcccagaaaaagggtgtctcccggaatgattctgacatcactgggtttcaggtccagggcattcagagcggccaccagaggaagagtgggaatgatatccccgccccagcggatgaaaagcggcggggagaccctgttttccggagctggggaaaacagctcgttattttccacgacggttcccagggagggggctgacgtggttatttgcggaggttcccctacgaacctgtccgcgcgcgggaactggtccgtctttcctacgatgttggaagcgggaataatcaagtctttccaatccggcggaaggggcgagcggcgggcggattcgctcatttgccggcccagagccttgtggaggaagcggtccagttcataccccacggcggctttgacaatgctgtccggcttttcttcccaggtcatgggggacatcacgtaaacattcctggctccctgttcatacaggtgccggaacagcactgtgtaatccatgggattgggaggataggaggcgaaactgttcagtgatgattcccggtgcagggaaaccacgggaagctgggccgtctgccctttgttgaagtaatcgtagggctggaggacgatgctgttttccgtattcagcccttccgggcgaacagtccggtattccccagccagcaaatgttccgctgcctgttcataacagaaaatggtaggaggaagaagcacataccccagaatccagcccagccccagggaaatctggaacagggacaggataagcaggaatttggggggaagcgtcatcagaggggctgggaaaaatcatgctagcatagcagccagcggttctgcaagcgtggagccgggcagaagcttccgcaggtgtcccagcccggcgggaatctgagccagataccaggtttttccctggttgtggccgatattggcgtaagcacccagcatctgcataatccgctgcagggcgcaggcacggaaaatacggtgatctatggagtgagcggagatattttcccactccctgagcaattcatccgcctgttccggttccagacgggcgtagccgtcatagaccagggaggccagatcatattccggacggccgccgcgcatgccctgaaaatcaatcagccaggtttttcccgcgtggatatgcacgttctgggactggctgtcccggtggacggggcattccggaagggccgacagaaactgcgcctgctctttcagggcgggatggttcaggaaggaagccggttccaaccccaggtgggatcccaggaaatgttcagcaaaataggactgctcccagcggtacaaggcctcgtcaaaagcgggctggaggggaaattcctccggaaacgggcaggagtgaagcagatggagttgttccatagcccggatgtagcgcaggcgcagggaaggccagggttctttccggaaagccagcaggttggcgtctcccaggtcttccaccaaggcggctccgcatccgggaccgagaggttcataatcgtaaatttccggcacgttgacaccgtgggcgtgcagatgccgggctgcggggataaaagaatcattgtccgcacggtcatttccccactggatgccgatgcatgtgcggccgccaaaatggatgcggacgatcgtacggccggaggctcccaaagccaggggacggaaatcttcctgacgcggaataatgtgaaaactccggtgaaccagacgggacaattctttcatggaaaggtggcgtggctgcgttaagagccttgcgtaaggatggcgtatgaaggatgacggcacccttcatacgccgaaaatgaggaaaggcagggcaatcaggcggggaactggtggtcttccccatagccgtaatgctccacgacgtaatccacatccttgtctccgcggccggagcagtttaccagaatggcgcctcctctgttttcccgtgcccacttcatggcatacgcgatagcgtgggagctttccagagcgggaatgatcccctcgtaacgggaaagtttgaagaaggcgtccacggcttcctcgtctgtggcggtgacatagttaacgcggccgatgtcgtgcagataggcgtgttccggccctacggaaggataatccaggccgctggctacggaatggaccggtcccggattgccgtcttcatcctggagcatgatgctttcaaaaccgtgcaggacgcccttgcgtccataggtgatggaggcggaatgatccccaagcctgggacctttgccgaggggttctacgccatagatatccagcgggtctcccaggaaggcggtaaacatgcccatggaattgctgccgccgcccacgcaggcgcagacggcgtccggcagaagtcccgtcatttccaggaattgttcccgggcttccacgccgatgcacatttggaaatcgcgcaccatttgcgggaaagggtgggggcctaccacggaaccgatgcagtaaatggaatcctgataactgttcaggtaagattcaaaggcggaatccacagcttccttcaaactttggaggccgtgcgtgacaggcaccaccttggcacccaggattttcatgcgggtgacgttcggagcctgcttggcaatatctaccgctcccatgtgaatttcgcattccaggccgaagaaggcggcggctgtagccagcgccacgccatgctgtcctgcgcccgtttccgcgataatgcgcttcttgcccatgtatttggccagaaggccttcccccatgcaatggttgagcttatgggcgcctgtatggttcaaatcttccctcttcaggtaaatttgagaggtgcccaggtggcgggaaaggcgttcgcagtggtaaaccggggtgggacgtccctgaaactgtttgcggatgcgccgcaattcattaatgaactgggcggagtgggctatcgtctggtaggcttccgtaatttcttcaaaagcgggaaccagctcgtccggcaggtaaacgccgccgtattcgccaaaacggccctgggcgtctggaaaattgcgtaaataagtatggagatccatggtctgttgcgttcgtgactgccagtatttagcacgatgccacaattcaggcaaaaacaatctccccggaagcccttttaaaaaagaaaggaaagaaaaaggacttccccgcaacaggggaacggtttctccgggagagaccgggaggaaaaatcggaaatcaggccaaacggcgctttctgatggattttccggtatcggcaagcgtctggcgtgcgtccggatccgcttcggccatcaaggctgccagatcccgaacgatgttctggcgcatgcgagctaccagatcgcgcccttcctgggtgatggcgaccatgattttgcggcggtctttggctgcgctcatgcgtttcaggtagcccatttcctgtaatttatccaccatgccggtagcggccgcggtagaatgccccattttctgggcaatgctggacatgctcagaaaatcttcgctggccagataagtcagcaggaaaaactgggggtaggaaaccttgccctcattcaattctgaagaaaggttcagaatgcaggaacgttgcgtgaacaggatgaaatccgccagcttgtttgcttcttcggaaatggagctcatgatcgttgtgaatgtatgggagggttgatagcgatacccgtccggagactcgccggcggttcggccaacctaccgccgcgtccttctacgggcaagtcaaaaatataaatttttattaaaattttacatttgcggataataagcattttgatggtatttgaaatacaatatgttgactgttaatagaatggatatattctgaatatagaatgtgaataacatgttaaaaatagatataagctattgataaacggtattttttcacaaaacttccgggaatccgcagcaaatctggcataaagaggcgttgcagcatgacaagcctggattgaagagggctcttgtgcagaggcttttcatgggaaataaagccttgccggaggaaaattttatacagcgggaagcaatattttcctgcccttgagacggacttggaacttctgcagtcttgacgtgagagtagagaaagggggcgttgaaaactttctttcatggcctccttcctgccgcgatagttgcggttccttgtttacggcggtatgagtctatgacgcttgtaaaggcaggaaaaacctttttaaacggtcctgaaaggaggggaaaagaacaaacggaaacctgccccatactgatggagcaagcgccgttacagacccggtttgggaatgacgctctgcttttgggagagaaaaattgcttcttccccaaaagtcaaaggctggcggaagtaataggggaaaatgctcaaggagccggaaaaagactgccggggttctaagaggttacctgcaaaactcctattatccggaacggcctattttgaaaatagtccagcggcagtgaaagggccgggcgcatcaaccgcattaataaatgctccattacagatgacgcatcattggttatcggcacggtgtgtaaaagagcaattgcgccgtccatgttcatattctgaaggtccgttatcaaatgttcacgaccatggaacttagagccgttaccattacatttcaatgatatcggtttgctggggatgcgtggttcattaattttttcagcatttattgtttacgagtggttcttatgtcattcctcgctattccgcacaacggaaaattttgtgatccgtcggcctgtttcctgaaaaataagaaagacggcgttgcttgccgtcccagctgccgccatacagcaaatccagctgcttgcagcattgcaggcagaaaatcatggaataaaacattactgccggcaacatcattgcatgccgccaaccttatgcttgtatccgcaagatattttattcccccgccattctccggtaagttttttctggaactcttttccggagaatggacggagaacaatagcaacaactagttggcgggaggcggcgtaaaggtgcgggctgacatatccttgtccagaaccagcattccctgtccttctcccttaatcatgcgtaatttgctgatgatgtccttgacggtttcttcctcttccacctgttcggtgacaaaccattgcaggaaaatatccgtggcgaaatcccgttcttccttggcaagatgcaccagctcgttgattcggcgagtgacttcctgttcgtgggacagcgtttcttcaaaaatttcaagaatattggaccagtttgcatccggagcgtctatggaaagcattgtaacctggcctccacgggaaagaaggaaatcataaaatttcagcgcatgagcggtttcttcctgatattgaatgcgcatccagtgggaaaaacctgtcagaccggcatcctgcagataggcggacatggccaggtaaaggttggctgaatacatttcccatttgatttgctcattaagagcagttgccattgttgtactgatcatattgtaaaatcctgttgatttttcccacttctacaaaacaaagtccgcaggatcaagataatcctgcggactgtatgacgggaagggggggaagggaaggcgtcaggcttttgcggaaacctcctccggaatattattttcagggagttcttccgccggaacggaggggaattctttagtttccgtaaccacgctgttttcttcagatgcttcctcccgggcggctgccgcctcggaagaagaggcggccttctgtttttctggtgcagcggagtccgttgccggcgcgtcctggcccttctcttccggtttccgtttttccttgggagccttcttgggagaaggagcttgagcggagacggttcttggacggctgacagtgttattggagaaaacaaggatgtagccctgttcggacagccagagcagatcacgaaccaaattctgctgtttttccatggcctgggctacttcttcttctgtggccttttcctgttccgggactggggccagctctttaagcatggcatcgacgcctttgccgggattattggccgcccaggtggcaatggacatcagggaatctgataagacggtgccttcttccatggccttggggcgtgccgggccggtgtaatggttgcctttccacttgaaaataggcatatgatgccgggctaacccgtggcaaaggttgggaatcagcatgctgggatggcggcgggtggtgccggataattggatcaggtgcgcccacagaccgggggagaggtgattctttttcacggctccgttgacgaacaccttgtccgtaacgtcatagcactcgtcaaagtggttggattcgaaatcctgttctaccgcggcgggagattccagaagcacttcggaggctccttcccgaacgggcttccaggcggtgcgtttggaaacggcttcctgccatgcctggacagcttcttcgctcttgtccgtcacaatcttggaacggaaagcctcaaaagtcatgttggcaaatttggtgcgatgcaggttcatcagggcggactggtagccgtgccaattaacgggacctatcagctcgttgtttaaggaacatttggcaatggctttgaaatctccttttggagcttccacttcctgttctacggattcgtaatatttgggcatccaggtggactgccagaggtgtttgacggcctcctgtcgggaaataaagcaggcgccgtcgccatgcttgcaatggtacagatccgggccgttttcctgcttcatgaatactaggtcataacggtcgtaggaacccatgaccaccttggcaagatccagcagggaaatggtgcggcggtgtttctgtacttcctggtgcagggcagccaggccggaatccacggggcgcagctccacgcgcaggccttccgtcggttcctccatggcggagcggggagtttgatcgcggcggttgcggaaggagccgcgcgtgcggtcttcccggttaaaccttctttcgccgctttgaccgtcaacacgacgttccccccggggctgacggccttcacggctgtcgcgccgcggtcggcggtcgcctccctgcctgtctccggacctgcgttccgggtaggatacaggccgttcctgacgggctcccggtctcgcccaggccggaccaaattgaaagtcggccaagccggaaaggtccggaatctgctgcttggggtctgtggaaggagtttcgtcggtcatcatgtacgggttgtttcaatagcaactaaatgaggtggatggcaatcattttacgtgcaaacagaccgaaaattgttcaaaatgtcatgaaaggcatctggaaatgcaactatttccggtgtatcctttcaactcaacttctgtcaaatgctctatatggataaaatacgtcaacgactttccgaccttggttacgccatttacgatgctcccgctcccgtaggctcctatgtgcaatgcgtacgcacgggcaacctgcttcacctctccggcggcatttctgtgaacggggacgacaaatactttggcaaagtagggcaggagctgacggtggaagaaggtcaggccgctgcgcgcgccgctattttgaatcgtctggccgttattgtgcaggcggtggggtctctggaaaaagtatcccgaatcgtggccgtgaacggatttgtaaatgccggcccggatttttatgaccatcctaaagtattgaatggcgcatccgatctgctggtggaagcctttggagaaattggccgccacagccgtacggcggtaggcgtatccgccctgccgctcaatgtagcggtggaaatcagcatggtggtggaagttcgtgattaatattaaaaaccggaagggattcgtgcttgaatcccggcggcattcctgtagagtgccgtccggtcaatgcccccgtggcggaatggtagacgctgcagacttaaaatctgttgtccgcaaggacgtaccggttcgagtccggtcgggggtacttctttaaataacaatgaattatgtaaattaaaggctcgctgtttgcgggcctttttgttttgcttcaatatcatttgttggctgattctccatcaataatttttgttttcccggatgagtaaaacaaggatggcggtgtttcgtggctattcttgtcatgaaatgcagaaagcagagagaagaatgttgagtggaaacagttctgaaaaaagagtttataacagggcgcctctggctgaaaaatagaaatacggagtatgaaattgttgggtatcttccggtttggaaaatcagatggttcatggcgccctggaaaaaagggaatgctgctggcgttgaaaatagcaggaggcatgtttgcgggagcggttgtggtatgcgttgccgcagaatggtacatttattccgtttcagagggcaggattgttgagcattccagggatgttcccgttcgtgctcctgttttggtgttaggatgctccccaacattcatggggagccctaacggatatttccataacaggatggatacggcctcggaactttggaaagatggaaaagcaacggttttcatcgtttccggagataatagttctcatgcttacaatgaaccggaatggatgaaacaggctctggtggaacgtggcgttccagaggaacggattgtatgtgactttgcgggattgcggactttggattctgtcgtgaggatgaaggaaatttttggcgtttcgacgatgattgttgtttctcaggaatttcataatgaacgcgccctggcaatcgcagcgcatgaggggatggcggcctgggccgtcagcgcgccggatgttcccaaccgccgttcccgtatgaaaagctggttcagggagcgtgcggcccgcgtatggatgatgctggacttgtgggtttggagccgtgaaccccgttttttgggagaacctgtggttttgccggaaataaaagaggaaaaatgaacaatacttcatgcggcagggctcgtcataagatgtctttgatgcggtacggcaacccagagggagggggtgcccgcgcctcgaatcattaaatgctgaatggtccaatcatgtcggctacgtgggatgatttgccatgaagatgaacaaggccagaaagcctgagtgaacaattcgtcatgaagacggtcggaggtggtggccgtacgtttcattgtccttcatggaagaaacaggtgcaatccttccccttatcttatgcgtatgggtgggcaacggttgaaaaaaggatggttgggaaacatcagaaagctgatgctctggtcggaataagcttgcctccatgtcttgggaaaaaacactccggaacaggttctgttgcgttttgatgcggctgacgctccctgttggaattccgtatttgattaaaaaggggaaaggatacggtaaaaatcattgactctttccgggaaagtgctatgcagatttcagtgctttgtgaaaagcgggctgttttattccggctgtcatgttcccttcttctagcggtcaggaaggccgtctctccaacggcaaaggctcggttcaactccggcagggaatgccatccggcagccatgttttgtttcctgccgtgaaaaggcggtaaattgcatcaggaaaagcaagctacgggggagttatgatggaaacacgctttcaatgactttccccgtccattccggtagtggctttcctccgaataaatgaagaagcatgggagcggtattggtggtattgtttggttcggaaatcaggaaatttctcttaatgcccggacctgaaatcccccatggaactatcatttccgctgcgctcgtccccccgtggccctttccgattcccccatgatccgtcagaaatagaaaatgcgtatcgttgaataagtcttcctgcctcaatttctgaaaaaagattccaatttgctgatccgcctcttcaatagattgaaggtattctctggacatccagccgtatttgtgccccgcatgatctgtatgaacggaatagagaaaaaccacagtcgggttgtagcggtgtttcttgacgaattggaaagcctgatggtaattggaagcataggcgtcgtttgccaggtacttgatttcatccaggtatttttcgttgaacggataggcaagaggtttccaattatagtaaaaagctgttttgcaggaaggctggcattttttcagggcctggaatacggagggataatatccgtcttcgtctctccgtacggcggggtaggaggaatttgccggcgtccagttattattgaagactccgtgctgttccgggccgctgccggttaagtgactggtccagttaggtaacgtgacggagggcatcacaacccgcgtatccagagaaaaagctccctgtgacatcattccttttaaagagggcgcatgcgccttttgaaaaccttccacacaaataccgtccagggaaatcatgatcactcttttggcggaattatcggaagttctatctggtacggaatttctgggaatgccggaatcatattgtgtagtggcaagggctgtattgcccgttgtcattcctgctgccgccaggcctaattgattcaggaaattccggcgtgttgtttgatgataagagttttccatataaagtacatactgttggcttgaagtatttttatcaacgcttctggatattcgggaagctcatttcatcgtatagttttttacggacaggggccgaatccgggtttcaaagcaatttttccaataattcgttcctttcctgtgataggatggttttatagagaaaggatattatcatttattgtattcaaatagttaagtgggtgtgacaatataggaatgctccgcaggctgtctcatctgcgatttaggcaaagcatcttccatacgcttcaaacgagggggcatatcatatttgttacgggccgtatcctcatcaatgttggccaaaatgccgggcgggagcggggactttcaatttggacgttttacacaggatgacattttccgcgagctggagcagatttttcaaggaagtgggtgttacgcgctgccgtgtggtgcagtcagctccctgaagaaagatcagccggaggcagacaaatatccctgatgttattcctccaacaagacgggacaagcccggcaggtgtgggtgtttgccagccatcacgatgctcgcgccgccattattaaatcagccaattagcataatgataccatgagagagatacaaatacagttttccaagcccggtaactggagggaattcacactaacagccatctaccaggattcggatggatatacccgcatagaccgctataaacagaatgatataccgtccgggcaggtcccggctttgagcgcggctgtagccgtcattgcagacatggaagaggactggcaagccgtccaggtatgggcaaggctgggaaatacctctgttctcaataattccgcagaagacgatgaggccgttgagtttcgtgaagcagttctactgacgattgaggctgtcaatagcctcgggggccgccgtatttttacccccggtaattatgcgcagttcatactgatggattttgcctccatatcgtttttcaagtattttaccatcagaaaataataaggatatcagcaaataagattgttggactgactgcatgattgcggcagactgggggatatgtgatgcagtgttttttccggacaaggcgtttccggatttgtcgatgcattgcaacagttttaaatggaaaagatgttcctcccaggcaggagaggatcaaaaacagggaatcaatgacagtaaccccatgagtgacgtaaagcagttcttggtcaacgttgggaacaggaagggcctggtttgtcgtgatgactcaaaaattgcagattcccttatgctctaatgtttatcggaaaacctggatggagtatcgtcatgcggttttaaaaatacagtacattgtttctaaaagtcattataatgtactgcggtttgtactgcggttctataaaaacaacaaccgcaagcgttctttttcaaacgcttgcggttgttttgagatggtggaggcgacgggagtcgaacccgtgtcctgaaggccattgatgacagcatctccatgttcagacgcatattgctgctttcgcggctgcttcgctatgcgtcaactaggcaagctcgctagttgcctgtggaagtctcgtgcgttgcgcggcaaccccgcattgcaccagcctgctgtgtcttcgtcgtcccctctagcaggcgttgaggttctgacgcggctgaactaattaggcagccagagcaaggtcgttagactctgcatttatttttttaatcggctttttagaaggccagccgattaaccttcacatgcagccagcaccgcagacttccagtcgaaaccatggcgcccccatatgtatttaccagtagagacaaaaaatcccgccgtgatgttcaggcaggaatcattttatttgctggcagtgatgtaagtggcacgcccgtagggattcgaaccccaaaccttctgatccgtagtcagacgctctatccaattgagctacgggcgctttgacttgcgtcgtgtaccgcgtaagcggtgaaggaaatatagatttttcttcgggaaagtcaagatgtttgtaagatgatttgagaaaaaaatcatttttctctttttgggagaataaattttcagagaaagaaccgttaactgaggggtggagaaaaaggggaaaggcgttgcgccatggaatggcctgtggcacactaaacggagaaaatgagcgagttcaaggtgatcaggtcgccgatggaggcattgaagaagtacttcggcttttcctgcttgagggagggccaggatcaagtggtggcttccattatggaaggccgcaatgtattggtcgtgatgcccacgggaggaggaaaatccctgtgttaccagcttccctccttgtgccgggacggggtttgcctggttgtcagtcctctaatcgctttaatgaaagatcaggtggatgctcttgtcgccagagggattcccgccaccatgattaacagctccctgagttttcctgagcaaaaggaacgtttggaaggaatgaagaagggtgcgttcaagctggtatatgtggctcctgaacgttttggtcatgaagggttcatgcatgctctggcggaggtggatgtaaatatggtggctgtggatgaagcgcattgcctgagccagtgggggcacgatttccgtccggattatctgaagctgggaaaagctgttgaaatgatggggcggcctcaggtggctgctctgaccgccacggctactccgcgggtgcgggaagatattctgaaacatttggggctggatgatccggtgacgatcgtacgagggtttgcgcgggaaaacctgcatttccgcattactgcgtgcgatacgcacaaagacaaatacaagaggctgtacgaattggtgaagcgttacaagacgggtattatttattgctccacccgcaaaaaagtggagcaggtatatgaggctctttccgattttggattgagcgtgacagcctatcacgcaggcatgacggatgaacagagagaggaagcccagaacgctttcatgaaccgccatgcggatattgttattgccacgaatgcttttggaatgggcattgaccgtgcggacgtcaggtttgttgcccattttgagattcccggcagtgtggaggcctattatcaggaggccggccgagccggacgagacggggaggaggcttattgcgaacttttgttcaaccatgcggatttgcggacccaggaattttttattgaaggagtgaatccgggaattccattgattgtggagctgtacgagttgctcaggaagcattgcagcgcggaaacccacgatgtcatgtggtctctggaggaaatggcggagcgtctcaaatgccgcaatgccatgcaggtgggagctgctttatccgttcttatacgcaatggagcgatcagccgtcatgacgttccgggacaacgcgtgaagcttaccagagtgacggatccttccgtaagcggcttgaagattcctctggatgaaggtgccctgcgggaaaaggaagtgagggaccgggaaaaactgaaggcaatgacggagttcgcttattcctccggctgccgtcagcaatggattttgaattatttcggggaggaagatggagtgccgtgcggccgctgcgaccagtgcctggccctgggcgttgaggaaggccaatccctgggagaagaagagactttggtggtgcggcaggcgttgagcgggattgcgcgcgcatccgtgcgtttggctgatggttcctggcagggaaggtggggcaggacgaaaatcatccagatgctcaaaggggcgaaaacccaggagttgttaagaacatccctggtccggctgagtacttatggcatcctttcccgatggagtgaggacgatatccgccagttgttccgtgccatgcagatggcgggattgaccagaatgagcggggaggcggaccgtcccctgattaccctgagtccgaaaggaaatgaagtgatgatggggcgcaagaaggcatctttggtttggccttttgcccgccggggaaaaatatccgtatctatggagcaggccagagttcggtctacgggaaatttggctgccctgggagagtttgacgaggatttgtttttgaagttgaaggagctgaggaatgaactggcacgggaagccgggattccggcttatgccgtgtttcataattctacactggaaggtttggccaggttgaaacctaccacccgccgtggtgctatgaacgttcacggcattggagagcagaaagctgctcgttacttggatgatttcctggaagtcattgccgagcattgcggggtgtgaatttgtctttccgatttgctccaatcaggcgtacgccgtctctggaatgtggtgttcatgctgaactgaggaactatttttcatgaattacggaaaaaatgttccatgctttgctaatatatttgccgggaaaatgcgtatttgtttgaataaattgttcatcaacatgaatttgtggatatttttactctttccagaaggttgtttttctgacctcatggaacaatcaaatgaatggttgtctatcccgatccagtaggatctagaagattgcctgatcaatatttttgactgtattatttatgtattgacttcattttgggaagcgtgtagtctcctttccacacattacccaagacggagcggtggctgagaggctgaaagcactcctttgctaaaggaacgtactggcaaaaccggtaccgagggttcgaatccctcccgctccgccaaagcctttcttttttaagagcctgcactttaacggtttaggctctttttctttgcaaaccaggggattagatgctggggaattatttgctggtctgattgtcttattttagttttttattttttcatttgaaattgaataacttaggccaaaaacgccggttaggatgtatagccagcgttttttctaatatccttattataggcatcaggataattataggtgcatttggaaaaaggtctggactggaggctgtccctgagggtatttgtgtgtgtgaatgatgatataaatttttgaatgtaagttagttgttgcaggagatggacaggataaaactgccgtggctggtaaaagtggagagtgcccggaattgaatgaacacgaatgtggttcatgcgccggtctcggagtggttcacggccgcatcggatatgttaacagcttcaggatgtgtgggaaagtatggaacagccactccagaatgggctctgtctttttttaatctgcggaggatttaacggattttggaataatctggtgttatcaatggtcaagaccatgaataacaatattaaagaacatcctatccaatttgaagcagatatgattcgggcattgctgcaggaatacagcactcccggcgagcacaaaaatcaaacccgccgcacgtgcggcctgaaccagtttaatgatctccctgaagctttgaaagaaagagggtgggagattcaggaatttatagaagagtccggctcgtggctggctgtttccgaggaaggaagcggaaagttttcagatatttttatcccgtggattgaatgtccctacgggaaagttggcgaccgtttgtgggtgcaggaggagatttgccataatagccgttctggatggctttattctgctgatggcgtttgtttgccaatgtcatatccagacggatggatatcaaaaaatgcccgcaggcagtttattccttcgatccacatgccgcgttgggcttcccggattttactggaaattacggaaatcagagttgagcggtttttggacattacgacgaacgatgcacggatggagggcattgaatgtgtttggcacgatgaagaaacggatgcctgtttatggagggattactcgggaaaatctgcggggttggcttttgcccggttatctttcttctctttgtgggaaaaaataaagggaaccggttccgctgaactgaatccgtgggtatgggttattaagttcaatgtgttaactatcaacggaaatatcaaataaagaatgttaatgccctttgtgaagaacaaaataagaatatgtcttttacagagggttcgcccactaagcggagggaatagcctccgttgcaattcagataaaatccgcgtgatgtaatcaactccgttttatcatgaaaaaagcgccttccggcaagggaaggcgctggatatgaaaaggtgaaaaagagggaggttacatccccttgtttttcatggcttccgccagggcggctcccatctgagccggtgtcttggcaaccacaataccggcgttcttcaaggcttcctgcttagcggcggcagtacctttgcctccggcaacgatggctcctgcatggcccatgcggcggcccttgggcgccgtggctcctgcgatgaacgcggcaacaggttttttgcagttgttcttgatccattcagcagcttcttcttcttcagaaccgccgatttcgccaatcatgatgaaggcgtccgtgttcggatcttccgtgaagaattgcacggcctgttgctgggtcatgccatggacagggtcgccgccgatgccgatgcacatgctctggccaaggcccatgttggtaacctgccagacggcttcataggtaagcgttccggaacgggagacaataccgattctgccgggtttgaagatgtaggccggcatgatgccgatcttgcagttggcggaaggattgacgattccggggcagttcgggccgatgagggttacgtccttgtccttcaggaaggttttcaccttctgcatgtcctgcacaggaatgccttccgtgatgcagacgatgagtttaacgcccgcgtcagcagcttccatgatggcgtccgctgcgaagggcggaggaacaaaaatcatggaggcattgcagtccgtagcttttttggcttccgccacagtatcgaagacggggactttgccttcaaagagctggccgcccttgccgggggtcacaccggcaaccacattggtgccgaagtccatgcagtttttggcgtggaacgcgccggcgcttccggtgatgccttgcacgaccagacgggtgtttttgtcaatgagaggtgtcattgtcgtaataaatagtgagggttatttaactgccgcaaccgctttctgggcagcttcgtccaggttgtcggcagggataatggagatgccgctgtctgcaaggattttcttgccgatttctacgttggtgccttccagacgtacgacgagcgggattttcatatcgatgtttttcgccgcagccacaatgccctgggcaatgacatcgcaacgcatgatgccaccgaagatgttgaccagaagggccttcacgtttttgtcgctggtgaggatgcggaacgcgttggttaccatttcttccgtggcggagcctcctacgtctaggaagtttgcgggttcgccgccgtagtatttgatgatgtccatcgtagccatggccagtccggcgccgttcaccatgcagccgatgttgccgtccaggccgatgtagttcaggtcgtacttgccggcttccacttcgcgggggtcttcttccgtttcatccctcatttccatgatttccgggtggcggtacagggcgttgtcgtcaaaattgaatttggcgtctagagcgcacacgcggtcatccgtggtaactacaagggggttgatttccaccagagagcagtccagagcggtgaaaagcttgtaaacgttggtgatgagcttggtggtctggcggagcaggggaccggtcagtcccagcgccacggcgattttgagagcctggaaaggcaggatgcccagcgccgggtcaatgtgttcgcggataatggcttccgggcgggtggtagccacttcttcaatgtccatgccgccttccgtactggccacgataacggggcattcccgggcgcggtcttgaagaatggcgaagtagcattcctttttgagatccacggcttccgccaccatgattttgctgaccagcttgccggtttccccggtttgcttggtgaccagaacctggttaagcatcttgccggcgacttcttccacttcctccacggacttgacgacgtggacgcctcccttaaaaccgtttttgaaggtgcctttaccacggccgccagcgtgtacctgtgccttaactacgtattgggagaggcccatgttccgggctgtttgtgctgcttcctgagctgtggcggcggcaatgcccttgggggtagccacgccaaaacgctcaaagagttgttttgcttgatattcgtgaatgttcatgacagtgggccgtttggccaaatgtttgcggaagaaaggctaggactatttttgatgtcggtcaagggagaatggtttggtcttttgattttttgtccggaggtgccgtgaagccctgttggaaatcaaagaggacagaaggcttgactgcgtgcttaaagattgggaaacttccttcccgtttttctgtagagactttttatgaaaatttaccgtccttccgatacctgctttgacgaaatgaagagccggatgaaccgccgcgccctcccggaggattccgtaagggataccgtgaacgctattatccaggatgtttccgcgcgcggggatgaagccctttttgactatgcctccagatttgacaaggtacatcttgattcttcctccctgttcgtgacggaggcagagctggcggaagcggaggccatggtggaggggagtgtgaaggaggccattgccgtctctctggcaaatatccattatttttcagaccgcagccgcaggcaggactggtccggcgtaaatgcgcagggcgtggaggtggcggagcggttccttccgtacgaccgtgtgggcatttatattcccggagggaaagcgcccctggtatccacttccatcatgacgggcggttttgctcaggccgccggcgtgcgggagattgtggccgctacgccctgcgggccggacggccgggtgaatcccgcacttttgtatgcgctgaaagcctccggcgcgacggaaattgtcaagatagggggcgctcaggcgatagccgcccttgcactggggacggagagcgtgaaaccggtggaaaagatttttggtcccggcaaccgttttgtggtggaggctaaacgccagttggtgggggctgttgccattgatttgctgcccggacccagtgaagtaatggtgctggcggatgatactgcggatgcagagtttctggctgccgacctgctggcgcagggcgagcatggcccggacagcgtagttgtttttgtcactacatcagaggcgttattggagcaggtggatgcggaagtggaacgccaggccgccctgctgagccgcggatccatcatccgggaggtgctggacaagcatgcctacggttttctggtttcttccattcaggaaggggtggaactggttaatgcctttgcgccggagcatttggtgcttgtcactcgggatgaagaggccgtacttaatggcatcaggacggcgggcgccatttacgcaggctccctttctactgtagcctgcggggattttctggcgggtcccagccatacgctgcctaccggcggcgccggcaagtctttttccggcttgcgggcggaccagttccagcgccgcaccagcgtggtgcgcatggaccgggatgccgtgctgaactccgccccgtatgtggcggagtttgcccgggtggaggggctggacgcccacaaccactccattcaggttcgcgccgcccgcgtgaaccggtaatcccggaattttcctcaatgctctccatgatgcaacagcagggaatcagggaacggttgcccgttgcagaagatctccttgttgccggacatggctatatgggcgtttcccggcatcatgggggtggagtgggggccgttgctgagagcatggtagtcggcttgccgacccgtttgcgagatttgtcgggatggaacgctcatcggatgggcggtttcatccatttgctcggaaatcccgcgtaatcgtttcaccgtattcctcatgttcaagtccctcatccgcacgtttgccattgtggcggccttcatcgcggggtacatgatgcccggcctgcatgtgtacagctggacattcaagtggatgctggtagtaatgctgtttgtaacctttctgggcatccgcttcaaacgaatgaagccggaacgggctcactggctcctgacgggggctaatctgatggtcgccctggcggcatggggtgtgtgccgccttgtttttggggatgggtatctggcacaggccgcttttttcgtaggcatcatgcctacagccacggcggctcccgtggtgatggggctgctgggaggcagcgtggagtttatgctgaccgcccttttgctaattaacggtattatctgcaccttgctgcctttcatcctgccggcggttgttgggcggggcggttttgagatttatctgaacgtggcccagaatatttccttggtaatgttacttcccctggctctggcattggcggcgcggcgcttttatcctcgcgccatcgcgtggcccaggaagttgaaagacgtcacttttggcatttgggtggtgattctggttttgatagccgcaaacgcctcttatgatatttcctcccgtgagggcatttcggaacgtgttttggaacagattggcgtgattgccctgctggtttgcggggtcaatttcgggttgggatatttgctggggggacgcacgcgcgctgcggagtgcagccaggcattagggcagaagaataccaccctgtccatttatctggctttgacgtatgccagccccattgccgctctgggccccacgttttatgtactgtggcataatttatggaatgcctggcagttgtaccgcgcgtccgaacgaaagcgcagggatggatgaggaaggggggcatccggtgcggcggaagtccccggcagaattatggggatttccatggtcggaaaaacgggagggagggttcttttgagccggttcccagtgacggccggcagactgttgaaggttcttttttatccactttcaggaacggcagaggagttctccccgagcaaaaagcttgaaattcggggaacgcccggtaacgttatgcacttgttatgcaggcgtcttctcctttgccccctctgtctccgcgtaccaagtggctgattgccctgtgcttgtgcgtgcttgtgatgctgctggagttcctgacgtaccacatggcgtaccgcatcggctatgatgaagggatgctgactactccgccggtggtggtgcagaaaagcgatgaaaaggccatgcagaatttgtcccgcttcatggcggatgtttttgcttcgcgcgagagcctggccggcattctggacaaccgggaggaacgccttgcatggatcagggatccggaactgcggacagaaacggcctggggcctcacccgggagctgattagccggggtggcgtcgttcctgctcttcctgcggccagggaattaattgacgctggatacgccgccgggcgctatcaggtatgggctccccgtgcggatgccgtggcaaaggctctgttggcggagcaccagtacacttccgcctacgattatttgaaaaccgctgaggagggatatgagaaggaaggaatggctgagccgctggtgcggacgctccagaccatgagttccattgaccagatgctgaacaggaatgaacaggctaatatgttgctccagcgtgcggtggatgccgctgcacatctggggccggatgccctccctgttaggtccaggcttttagccgcccagggaaggctggcacgtactacggggcgcattccggaatcgcgcgagtatttcaagaaggctctggctctttgtcctcagccggacaagaccaccggagacctggccctggccagcatcagcatgggggaggccatgttggaagccggcaggaaggatgaggcacgggaattgtttttaaagggcctttccggctcggaaaatgcctcttacctgttgaatgactgcctcaatgccctgcgcggcctggcccgtatttctacggagcaggggaattatgaggaggccctggcttatctttaccaggcggaaggcgctgcccgcggcgtactgccggcggaccatgccttttgggccgggttgtatgatcagagggggtgggtcaacatcttgcgcaaggcctctccggaagcccgggcggattttttaaaggccattgccaacagctcggcttctcccgtcatttccgcccagtcccgcgaagggctgggcaaggcatggctggatgccggggaggggggcaaggccagggagaacctggaaaaggctcttcagctgcggaagtcccatttcgcctcggatcttctgtccctgggccgcgtatattattccctgggacttgccagcgatatggcgggggacagggagggcgccctgactgcctatgccggagcggtggattctctgctgaaatgcgtggagggggcggaacgcagggatttgctggttcagtcttatttgtgtaaggcgtacgctctgtgtgacggagaacaatggaaagaggcggcagaagcttttgaggcggttcttcccatgctggagggggaacagaggtcggagaattacaaacagcttggacgctgttatgacgaactgggcatgaaggagaaagcggatgactgctggaaggaatccggttttccccgggtgcgcatggcatcccccgggcgcagaccctccgtgaactccagatcttcacggaggtaggatgcgaggggcttcgtaagacgttgcgaggcgtttattttgcttgatttgtgccgtctttttggctcaatgcctgcatgagttccgagcgccatttttccagtaagccctaccgccccgcacgcaagaaaaagtcttattggaagccggtcctctttttggtcctcctgggaggactctggttcggctacatccagtactggcctacgatagaagggtggttcaagccgaccattcatgaggtgcacagccagacgcaggccatggggcatttgcaggatatgctggcttcatggaacggttccgatgcagagctggcgcagatggcatcctccgtggacaagcaggtggaatggatgaattctcccgaagccagagattcctttgcatggcttttggcggtggaaatggaccggcgcggcatgctgaaagaatccgaacctatgctggctgctcttctgggaaaaaagctggctgcttcctcctccatgacggcggaggacaatacccgccttctgggcgtcagcctgaactgggcgcgggaattcgcccgccgcaagcatgatgctgtggcggaaaagctttatgaagtgattttgaaaaatacgccggaagaccaggtttccatccgtttagcgtgcttggagccattaatccattatgcgtacgaccaggccaggtttgagcgtttttccgcgttgtgcaagcaggctgtttctcctgtcatgaggagcatgctgaataaaccggaggatgtgaagagcatggtaaaaatcctgttgcttcaggataccctgcctgacaaggctaccgggttgcccagcggcacaggaagtgcgattgcccgggagcttcttactaaattccgcctgaccgccaaccctgatatgggccgcattatcctgaatgaactgaagatgccgctgaacacgcgccggaagtattcccaggaagaattgaaggccatggccgaccagctggaagcagccctgatctgcttccgtgcggctgaaacggagatggactgcacgccggagacaatgcttgccctggcgcgggtaaggatgcaaatgggggatttgagggaggcctcccgcctgttgtcccgtgcggaaggagccgccatgacgcttggcgtggatgctccccgtattttgagcggctccagcctgagccaggatattgcgtccatgcgctcccagcttgaaaaatacagccaggcagaggctttggtgaaacgggcttatgaagatgtgaatatcgccgcagctttcctgaaggcgcgggattacgatcaggctgtgaagtatctggagcaggcaatgaaagtggcccgtgaaaataccacgtttgttcaggcgcttcagccggtcattctgaatcttcaggcggagataagcgctggcagggaacaatgggctctgtcggagtcccaatatggaaagttgattgcggagtgggatgcgttgactccggaagataaggaaaaactccggaacaatctggcctccatccagttgggagagctttacaatgaaattcaccgcaactgggctggtgtgtgcctcaagcaaaaacgaaccacagaggcccgcagggtgctggggaagataggagaggtgccggctgaagaaccggagaggcctgcttcgcgccgacgccgcagatagcagaccccttccttcagttaggccgttccttttttggaaaggcaaagttctccattggcagatgccggaggggctcagagttcccagaggctccggtcgggagcttgaccaaagcgggatacctgcggtcagctacgtgaggctgaaggggctttttaaggaaatgtgccgctttaatctcccttggcgtcatcaaagagctttggcacaggttccgtttccctgtatcgacgggtacccggcattccggagagaaaaaatggattttaggccctcaacaaactatatgcctcttattggggcaaatgtaacgtttccggtatgctccatactctcaagcagagctgaaaaacagcttctgcggaaccttcagctgcggactttggctttctgccttacatggctgagagccctttttccatgaaccattttttcacggcggtcagctgcggattgacggcgggagcgcacagtatattttgcgaaaatttggctaaccgtaaggttgccctgttcgaaaagtttgaaaatattatctctcaccctcatggcttcctgaagcgccgcgtcagcgcccccgtattgagaatcggagaaataacgggtgaataaacgcttgttcttacagatcgccaaccgatagccctgaaaggccgttgtttcgtaagtgtaacgggtgatgtttttacaaggcatatgaacagaagttatgggaccgggtgatagaagcagtgataagcttctattagaataagttccatttcctgtaaaatccagaaaaaacacaatttgttagattgagtgcaaaaaatgcactgctagatgcttgtggacaggttattgtggcgtgtcatccctgacataaaaacaaccgtcggaaacacggattttcaatttttcccctgcatgcacctggtttgtctgccggataagctgcttatcctggttttccaccagggcatatccgcggcgcagggtctgttccgggctgtgtgcttcaagacgtgcttgaataagagtgagttgtgaagataaatccgtcatgcgggcggcggcagcatgggataaaccggcctgaagggaagccagaagctgtgtacgctcccggttcctgtgggcgggatggcgcatttgcagttgatgttccaatttgttaatatgcagcgcattatgaaaaattctcgtggttgcggcattctgcagagtttcttccatatcgtccaggcgctgagaataaggagagagcagggaatacgcatccaacagtttccctcgcaggtaaacatccagtttcagcttggaacgcaagagggaatgccgagcggatgcatgaagagcctgttccattctggacagcttgcggagccattcggggccgtccggtgtggccagttccgcggctgcagtgggagtgggagcgcgcagatccgctacaaaatcggcaatggtgaagtccgtatcatgacccactgcggaaatcacgggaacggtacattcgtaaatggcgcgcgccaccgtttcctcattgaaatcccacaaatcctcaatggagccgccgccgcggcctacaatgagcacgtccacgggagggagaccgttaaagggggctccggaccaagcgcgcacggctgcggctatttcgtgctccgctcctgccccctgcacgcgtacgggcagcagataagccttcacccacggggcgcggcgttccaatacgtgccgcatgtcctggatgacggcgccggtgggggaggtgacgatgccgatggcgcgggggaacgtgggaattttctttttgtgttccgcatcaaacaacccctcgcgctggagtttggctttcaactccaaaaagcgagtctgcaaatctccctgtcctgcagcttttacctgcctgatgaccagctggagttgcccccggtccgggtatacggtggcgctgcccaggacatggactttcatcccttcctggagccgtatggggcatttggaagccgctaccttgaaaaaggcgcagaaaatttccgctccctgttccttcagggtgaaataaacgtggccgctggtgtgatgcttgacgttactcagttctcccaccacccactgggtgcccatagcgatgctgaccgtgtccctcaggcggtaaacgagctgtttgactgtgatgggtttgggcgcggcggacgtttcctccgggaattccataaattacggttcaaaggggatgttcagcgcttcatacgccagcatcctgcattgcttgatatccagcttgccggatgggagcaccgggatgcgttctacgggaataatctccttggggcaccagagggccggcagcccctggtcaatcaggccgtgcctgatgagggtgcgcgcctggtgcacgtaatccgtcaccagggtggtgagcagggctacggcctccccttttacggggtccggaatggtgacgacggctatccgccgttcttcgtccgccggatccagattccaaatgttcataatggctgcttccagggcttcatgaggcaccatttccccacctattttggaaaagcgggaaatgcgtccttcaatcttcaggaagccgaattcgtctgcggaacctatgtctccggtttttagccagccgtccacgaaaatatcgcgatccgtctccggaccgcccagatagccgggaaagatgttcggtcctttcagccagatcatgccggaagtagtgatgggaaccacgcgtcccgtgtgagggctggtgatgcgtatggcgattccgggaaggagggctcctacggaactctttttcatgccgggaatgaagtctccggcggcattggatggcgccgggtcaatgaagttgacggaacagacgggagaggcttccgtcaggccgtagccttcgcatggaatgatgccgaatttttcccggaaagcggcggaaaggtcttccggcagtttttccgcgccaacgatcaggtagcggacggttttaaaggtgtccggttcgcagcgtttcatgaaaccgcgcaggaaggtgggcgtggtgactaccagactgattccgtactgcttgataagggctcccagccgtttggcctcaagaggggatggataggtgaccatgtcgtacccgccgatcatcggataccatagcccgatggtgatgccgaagcagtggaatacgggcaggcttcccagaaacctgctttgcggttccagcgtaatgcgggaggaacattgagagatgttggaaagaaggttgtggtgggtcagcggcacgcccttgggttccccggaagagccggaagtgaacatcagcacggcttcgtccgcgcctgtaggtgcgtccagccccagttttttaatcatgaaccccgctgtcaggaatttgatggcgaggccccagcgtttggcggaacctttaagcaggggaatttcccgctccatgaggatcagatcccgctgggggggccacgggaaattctggagctttcgcatgaaggtatccgcagtaataaaccagtccacgccggattgctttacagagctggcaaaggctccttccgaggcggaataattgaaattcaccggtgttttcccggcgaacaggcagcccagattggctatggccgctcccttgcccggcggaagaatgatgccgacccggcgattcgaggtaatttttttcaacctcttggcaaaggctacggaaatggccagtagctggccgtaagtcagcgtagtgtcgtcaatgccgtcgatgacccggcaatcggaatgaagtctgaggctgcggaaaaggagggcggacagggaaccgtggagctgaggcagcgtggcgtatgcctgggcggaacattccagccacgcggaggtcaggcgtgctgccatctcggccccgggggccagtttggggagaatatgtatctggatgtccgcctgggcgtccgtatcggcctccgcatccagcacggagttcgtgtaaaaaccggcatagaccggtacgggggagatatgcagggcttccagggccttgatgacccgcggaggaatttggctgatggaacctttcacatgggagacgggaccgggtagaaatactactcttctgccttcgttaatgcgttccatgatggcggaacgcagcgcgacagggtcgctgcctccagcctggaacaggatgccgtccgctttagtggattccagatgggaggcggtggccgtatccggggggagaccttcttccaccaggtaagtcatgcggtccctgcccagttctttttcgaacatcagtagggttttataagatactttgttgaagatcaacagatcacctgagtcggataaattggaggaaccaaaaatggccatgggaaaaggataaaaaatttgcttgaagcattttagcaacttgaagagccgggagcaaggaggaaaggtgcattcccggttgcttttcctttatccggacaggtcttggaagtctttcccctctcggtacgttttttatgggaagagtgttgtttttcatgggattgcctggatttggcgttatctcctgcgaaggagtttccgcaaaccagctgttccgatatttacttactgatgaatgggcctggtaggcagcaacatcttcggacgagaagcgctggcggaaatccgcgtaaacgcggcgcaggacctgggagaccggagaggggaaacgaacatctctctgctgggcaaccccggcttcgcgcaaagcgtgaggggggcgaaagtgggaacgacggcgctgcagctgggagccggactgagcgtgccgatgggaacgaagagaactatcttcgtgaaggggaacgcggacatccgggacggggctgctcagtaaacgggacgtatcagctactgctacgatttctggtctttgctccgaacttgttgcgggcaaacaatacaccctctttttctatgtatgaaaggtgaaattcacgaaaggtgttattttgctgcatcgtttgttcaggaatggggaagggatgaaaaataatttttgcgtccatttttattttcatgtgaaatgttgcattgcggattagcaatccgcagaagcattatccagaaaatagaccagaatcagatatttttgatgtttataatgaaagagatatggaatgttttttttgaaaaaacattgaattggatattaagaagatgatgatttccgggtatgcaacaggcattggatcaatgttgaatattgacggcggattgctaattcggtaatagatatatattgcaaacagccaatcaggacggctggatagctttattatttacccatatttgcaagttatgaagttacgtctaccgctcaagttgttgtccgccttattgccgttttatgccatatccggttttcatgtgttcgctgctacggagtgggacggcagcagatattccggtaatatctatacgtgggtagggagttcgtccaatgattttcataacggcggcattgtcctgaccaatccggatggaacatacggtcctgtcaatacgaattggggttccgtttcagaggaggggagtatttggaacctttttgccaatgaaacgggactgtcgcaatataacacattgcgctttgtcgcatcaggcacggaagtgggcgatgtcaccgtatcggcgaccaataaaaatccatcctgctcctttacgccatttaccatggggggattgattgtggaggaaggggcatcagggttctcccttgtcccgaacaataatgcccagaggactcttatactggggagagcgggtacggaagagccggtattatttacggttcgtgaagatttttccctgggttcttcctccaatgcatggggcccggttaatgtgaatgcagactggaatgtccttgtggcaaatggcaagacgctgaatgtttacggggcactgaattcttccggccggaccattacggtgggcggggaaggattcagcggtacgttggttttaaacaatgcggccaatgcatccatgactgctgaatgggtcatcacctccggctctactgtaaggtgcatgaataattccgctttgggaagcggccttgttacgctggatggggggacgcttgattttaactcgcaaacgatcggatcaaccattacgttgaacatgagcgggaccgggacattgcagaatgtgacagttgatggagcaattttatcttatacgtcttcatcgggaaatgatgggattactgcttcaaataccacgtggacgtccgggaagatagatattgggcgtttgttgcagggattcagtgccgaaggttccaataccgttgatttaggaagcaacctcggcgcgaattttaccgtattgggcttagagacagggcaatatagaatagaaggcagcgtgctgacgatagaagacggggcgatatcccgtgtgacgtgggtatctgcgggagcgggaggggaattggaagaaacggtcaagaacgcctttacgctggctcttggggaggggagagcggccaacgtcagcctgggatatctgaacgggaccctgacgaccagcggggacaaagtctatcaaatcaccaacaccggcgaaactaaaatcaacctgtccggggtatacaacagcggggcgaccctgccgtccggcaacctcaactaccagggggacatctggatggacatcaacggaggagcattcggcatcatcgccggaggtgtcaccaatgaatggagcaccaaactccagaccagcacgctgactggggacacccatgtgcagctttccggcgacgccacggcggaacacgtcatcggcgggaacaacaagggagcaagcactaccctgacgggaaacaccaacgttaccgtcaaggataacgccatcgtggcgggagccatcatcggcgggagcacctccgcccacaacgccgtcaccaccatcacgggcaacacgagcgtgctggtaaccaatgtccaatattccaacacggcccagaacctggatgggggactctccaactcatacatcatcggaggaagctcctggtcaagcaataccacttccggaacaacgattcaaggcagcacgtcggctacaatcaacctgaacggaatcacgctttccggaacagaggaacacaacagcttcgtcaaaacaatcattggcggcagttatggcaatgtaaacaacgccggaacggtcaacaacatcaacggagacacctccgtttccatcatcggcagggaaggaatcaccttcacgggggacatcattgggggttcctttgaaaattcaggccaggcccaatacacgattggaggaaattcctccatctccattagcggaggctccaccttcaccggcaacatctacggtggctcctactccaaagtgccaggaaacacaggcagcaccatgaccactgcaggcaatatcacggtagaactcggaacaggcgcctaccggggaaacatttatggagcaggaaataaaggcacggcaggaggcgacgtcctcgtctcgctgacgggaggaagcgtctttggggcggaaggggaacaaagcggcatcaccatcggcggaagcgccggagcggcggtcgaaggaaacaggacgctggaactcaagggaacctttggaaccggggacttccaaaacgtcaccttcacccggtttgatgaaatcaatatcgcgcaggaaggagcctcggccaccatctacgcgctgaccgacagcccggccctgaccaaaacgggagcgggaaccctgacactcggggcggacgcggcaggagcggaaaccatccttgacggaaccacggaaggaatcaccatctcggaaggcagcctgaacctctccggcgccggcggcagccatatgaaaggaacgtggaacatcgcctccggctcccgtctcaccggagtcagcggaaccgtaaccgtaggagaaggaggcctggacggactgaccatcgccctgggaacggaaaacatcggccaggacacgcaggcgtctggcgccgtcatcagcaacggcagcggaacgggaagcgacccgaacctgtccataaagggggaagggctgacgctggacctgagcaacgacgccgtcgtcaaccttctgctggaccacaaaaccgacgactcctccagctacctgaccctgaccagcggaacgctgaccgtcggcgacctgggcgacatcgccttcacgaccgaccttctgtccaactacggcatccgggtcaccggaacggacggaggaagcctggtgctcagcggagcggccaccggcctctaccgcgtgcaggaggaaggaggaaacgcccatgaagtcaactcctatcaaacgctctccggctacgccggcgtcgtcatcggcggcggccagaccctgacggtcaacctggccggagccccgggcgaatccgacggacagggagctaaaatcaacaacctgatgggagccacgggcagcagcctagtcgtcaacaacaccggagacggcacggccgtcgtcatcctcaacaacaaacaaatgacgacgggagaagacgacatcgacccggccggccaggacaccgtcatgggcggcagcatcacgggaggcaacaacgtcgccttcatcaaggaaggaaccgggacgctgacggtcggaggaacgatggacgtggaaaccctcgccctgcgtgaaggaaacatcgtcctcaacggcgcgtcaaacaccctggacaccctcactctggaaggaggcggcctgaccattaacggcaacgccgaagtcggaaccatcaccggcacggaagccggaggctccctgaccatccagggaactctcaacctgactggaacaggcgaaataaacgacggctccatcaccggaaccggctccctccgtatccgggaaggagcggaactggctctgggcggagaagcccggctggacggaacctcagtcaccgccgacggcacgctggccctcaccggaacggaatccggcaccatcagcagcctctccggcagcggcaccctgtccatgaacggaggccgcctctccatctcctcggcaacaacctcctccggaaccttctccggcacgctggcaggcagcggcaccctggacatctccgggcaagccacccaatacctgcaaaccggcaataaggactacgacctcgccgtccgtgacggaggcgtcctggtcctgaaaggcgccgcggacgcccccacgctgaactacaacagcatcaccgccggaaacaacggcaccctgcgtattgaagccaccggggacgcccagggcagcgccaacaccacgctcaacgtggaaaacatcaccttccagaacggctccacgacggaactgatctacaacttcaaccaggacgccccctttggcgcccccatgctgacggcgggcaccatcaccgtgcaggacggagccggcttcctcctctccaacatggaaggaaacgccgccatgaacgcggggagcgacctccatgacgtcgtcctgatgagcgctaccggcagcatcagcggcctggaagacgggcagagcctcgccgcccggatatccggcctcttcgccgtctactaccaggacgccacactgagccgcgacggaaacgacatcctgctcaatgccacactccggcaggaaaacctcttcgcctccgcggccgacacgtggaactccgccgccggagccggcctgctctgggaagcccgcaaaaacctggaccccgactcccagctggcccaattcatgaacggcgtcagcaccatgatcaatgacggcaacctctccggagcctcccgcgccatggcggcggcggctgggagcacggtcaacgcgcttgggacggcacagagggacgccctgcgcgaccagatgggctggatcaggaaccggaccaccctcatgggcgtcaacccggcctacgtcaacgacgacctcccccgcttccacatgtggatggaaggcacgggctcctacgccaaactggacacccgcggggatgaaagcggctaccagctcaccacctggggaggcacggtaggcgtggacgcggacctcagcgaccgcctcacggcgggagcggcctttacggccggctacggcgacctgacggccggcgcggcggacagcgccgacgggcgcctggacagctactacgccagcctcttcgggcgctaccagaacaaacgctgggcgcacacgctcatcctgacgggaggatggaacgacgcgaaactcaaccgtacggtcaactacggggaaggaagctacgggacgcagggaagcaccagcgggtggggtcttggagcgatgtacgaactcacctgcgacatctacctcgacgaaaaccgcagcagcgtgctgcagccgctgttcaacgcctcggtggtgacgacgcggatggacggctatgaggaaacgggagcgggcaacgcgggcctgaacgtcggccggcaggactggacgacggggacgctggcgctgggcggccgttggatgggtctggtgggcagcaacatcttcggccgggaatcgctggcggaaatccgcgtgaacgcggcgcaggacctgggagaccggagaggggaaacgaacgtatctctgctgggcaaccccggctttgcgcaaagcgtgagaggggcgaaaacgggaacgacggcgctgcagctgggagccggactgagcgtgccggtgggaacgaagggaaccatctacgtgaacgggaacgcggacatccgtgacgggtccagctcggtcaacggaagcgtcggctaccgctacgacttctaaaagaaagaaaacccaaggagaaggcaccacccccgaaaagccttcctcctggccctccagagccgttccggaacaactccggaacggctctgttgcctgaggaaaccccctgggggcggcccggatgggccaaaaacaaaacagcggcaagaaaaaaatacgccgtccccacggaaaccatggcccttcttcccctcgtcccctcccgtgaaacgcctcatcctctcctcaaatctgtaaaaacgcgccaaatgtttccgaaagccctctccgctatccggagccggaaaagaacggaacgcgagcaatagggccttttttatgcgatttcagcggttttccattccaataccgcttccgcccgcagttcatctccgtgcatgaggtggtgggaggtgagggagtccctgaagaacagcagggatttcatggaatctcccgcatgggtttcttttctgaaatgcaggtgaattcccgtcagttggtggttctttagccaggagtccggaagggagtccagagcccagaccagataggcggcattgttgatgtggcggttgaaatccgtatcccggcgttccgccgtccattccctgatcatcggcagaagccctgaaatgtccatggataccggagccaccgtttctttgcatggggtatccgggaaagagctgatgtgcctgtttaatggcacaggacgcctgcggcgtatatcaatgacagcccacagacagcttgctgcaacgatgcagttaccttgggcatccctgatttccaggttgcggcgcgccagcagaggcgtttcctgggccgtccaggttcggagttccactgtttccttccaccggggaaggcggctgacggccgcatccaggcgcacttccacccatgccaggctgcgggacgttacgaaatcatagccgaaacccaggcaggaggcatgggcttccgctatttcctggaaccagtgcagaaccgtttccggtttcatcaggccattcgcaccgctttcgtaagtgcggacggttgcctgaacggaatagatttccttgttgctggcatattccataacatcttatgctagcggaggcgttctttcggagccagtcaaaaacgggtaatatccggctgtttggcatgccgccccccggtaaatgagtggccccgtaatttccgggctgcctgccttggggagcggcatgcaattgaaatcctttcagcagccgctgaggttgacttaccttatttctagagaatgccccggaaataggcgatggtcttttccaaccctttttccagcgtaatatgaggcttccaccccagcttttcttttgccagccgaatatccggtttgcgttgggtcgggtcgtccaagggcagagggcggaatactgttttggaagaagatcctgtcatttcaatgactttttccgccagttccagcatggtgaattcctctggattacccaggttgaccgggccggaaaaaccttccgtatccatcatgcgcaccattccctccaccaggtcgtccacgtactggaaactccgggtctgtttgcccgttccgtaaatggtgatgtcttcccccttcagcgcctgaacgatgaagttggagacaactcttccgtcgttggggttcattcgcggtccgtaagtgttgaagatgcggatgatgcgaacgtccaccccgttcatgcggcggtagtccatgaacagggtctccgcgcatcttttgccttcgtcatagcaggagcggacgcccacggggttgacgtttccccagtaggtttccggctggggatggaccatgggatcaccgtatacttcgctggtggaggcctggaggattctggccttgcaccgtttggcaaggcccagcatattcagagctcccagcacggaagtcttcattgtgtggatggggtcaaactgataatggggaggagaggcggggcaggccaggttgtagatttggtcaacttccatgacataaggaacggtaacgtcatggcgtattacttcaaatccgggataatccgtcaggtggaggatgttttgtttgctgcccgtgaagaagttgtccatgcagataacttcatggccttccctgagaagccgttcactgagatgggagccgatgaagccggcgcctccggtaatcaaaatccttttgctcatgatggcatgtccatgcgtttgttcgttccgccgcgccggaagggaagcaagcggaaagttttccccagtccgtgcgttgcggttcaatgtcacatatccgtcacgggaaggcaagcgcatagcatcccggacggaatattacaggaatgtccgggaaaggcagggggtgaaccaggaaggtttttccgtacggaccgggaagcgaattcggttggtttccggctgtcccgccggcaggttcaggatttgggaatcgtcagcagaaagctggctccccccagggtgccgaattccagtttcaggtctccccccagggaacgtgccgtgtcccttgccagcgccagccccaggcctacgccgggtttccggctgttggtagcgtcttttgtgcgccggaagggcttgaagacaagcttgcggtttttcggggaaattcctgggccgttgtcgcggaagcggatgacgatgttgtggcggtccgcctggacggtgagctggactttggcgttttcccccttggcgtatttaatggcgttggaagtcaggttgtccataatctgctctacggaaacggcatccgtatgaataggaaggatgcggatgggctgggccagggcaaaggagaagctgatgtccgcctcccggaggcggcgttctattttttccgcaatgggttcaaaaagctcctgacaggtgagcgtgtcccgcgcgcggcgaatagcgttccgctgaagccgggagtaggagagtacgttttcaatcaggtgttccagacggcggcattcccgctgcatgttggcatagtattccggctttttctgttccggcaccatgccgtcttccagcatttccgtgtacagggagaaggacgtgaggggcgtccggagttcatgggtgacggcggagacgaagtccccgcggcgctgttccaggcggaaggttcccagcatgagccagatgaccccggccgcacccaggagcaccatgctccagatgagggtgagcgtccaggtcagcatttttttgtggtcctggagaggaacggctccggcgtctcccggaaggaaaaccaggggggcgttggcaaaggggagtgcgcccgcctgccgggtttcctccgggggcggggaggaggggtcgaaggttgccaggcggctgtggggaagcagcatctttacctggccgggcaggcgtctgttcaggttgtccatgttcatcagggccccctgcaagtaaatgccgcggctggtatgcacctggcgcaggatgtaaaggttccctccgtcttccacgggaacgaaggaagtgacagtttccacttgtgccggagcgccggataccgttggctccggttccggagattcatgcagaatttcattccggatatccgtccagaggtttccgctggacggaacggaggtgagggaggagaccttgccgttcagccgctggtaaaggtccttctgttcattcagccgcccggcaagctccgggggaagagcggggccggttacgcgcccggcaggggaaatctgaatgaaggctgtaacgtagtccggcaggtaggcggcgagattggaaccacgggttgcttctccgggggccggggcgcccatcctcaggtcataggggcgtttgtaggcataaacgggctggtattcaaaatagccgcgggcctgttcgaatgtgatgaaggaggtcagaaggcggtccatttccagcttggcttcatgggccagggcttccaccctgatacgctgttcggaatggcctgtttcttccgcctgcaccagcagaacatgggtgagccatccgagcgtgccgatgaccagcagcaggctgattgccagcagaatgatgcgtatgcgccggttcacggatcaggaaacgaaggatgaattccagcggtagccctggcttctaagcgtctccaggggggaggcggaggcggccccgagcttgtcccggagacgcatgacggtcatttccacggagcgcgtatccgtcaggcgcgggtccacgtcccatacgcgccggagcagttcgtccctcgtgataacgcggttggggtgggtggccatataggtgaggaattcgaattcccgcgcggtcagggaggtttccctcccgtctttaaaggtgatcaggcggttggcgctgtccagggtggcgccggggatcctgatttcccggagctggcgcggccgttccggagacctgcgcagaacggcctcgatgcgggcgagcagttcccggatgctgaacggcttgacaatatagtcgtccgcccccagcttgagcccctgcacgcggtcttcctcctctccacgggccgtgagcatgatgacaggcgttccggggcgttcctcagacatgacctgcagcacctggaatccgtccgcgcccggcatggccacgtccagcagggcgaggtcgaaattgcgttcccgcacggcatggatggcggccaggccttcttccagagccagcacttcgtagccggatgcggtcagaacgtccgtcagggcatgcctgatgctgtcgtcgtcctccgcaatcagaatggtataggctgaatcactcatcgtttgattctataaaaccacaatatttcccctgttgtatagagaaacctgcgccctttcagtaacaatgccataacaggccgtcttcccggggggggcttagtgatgccggagttcccggaaggggggaggaaggctgccggagggaatttcaatggcctccatgggaccggggacaattccttcaaagaacggcgtacctttgtaggaaaggatgattttggaatgcaccatgccgcccgtagtctggcgcaggaaatccgcatcccggaagaccaggagcgtctttccgttttccccgggtacaggacggcactggaagtcgccaagcggtgttccgtcagccgccgtcatctggacgggcagtatataggcttccgaaaaagaaggagcgtaaacaccccagaaggaagtgagcgccataacgacgacgatcacgatgccgacaatgattttcgtggaggtggacatgcggagggcggtgttctgacccgtacgtccacctccggtacggtggccgtgcggcgtcagcgttgttgaagccattcggcggcctggggggcgtaatacgtaaggatcatatcggccccggcgcgccggatggatattagagtctccagaactgtttcccgttcatccagccagccagaagctgcggcggacttgatcatcaggtactccccgctgacatggtaggcggctatgggaagggtcacctgcttccgcatggcggccataacgtccagatacaatgtggcgggtttcaccatcaggatgtccgcaccctccgcttcatccagctgcgcttccctaagggcttcccggatgttgccgggatccatctggtaggtttttttatccccttccttgggcgcgctctccagagctccgcggaacggcccgtacagagcgctggcgtacttggcggtataggccatgatggagacatcgtccagggcttcggaatccagggtggcgcggatggcggccacgcggccgtccatcatgtcgctgggggagacgatatccgccccggcatccgcgtggcacaatgcctggcggcagagaacctccacggaatcgtcgttaaggatttccatcgttccgtcggagcggaatcccactaggccgtcatggccgtcggaattgtagggatccagggctacgtccgtcatgacggtgatgcccggcacttcgcttttgagcgcgtaaatggtgcgcgggatgaggccgtcagggttgcaggcttcgcaggcgtccggcgtttttttctcatccggaatggctggaaaaagatccagcgtccggatgcccagatccatcaggcgcttagcttcctccaccagtcccttgacgctccagcgcgtgcagcccggcagggaggggatgggctggttcccggtcccttcatggacgaagacgggatagatgaggtgttccggggaaagggaggtttcccggataagaccccggatgttggcggattttctgttgcggcgaggccgtatcggtagattcatcatggtgtggtaatgaaaaggtttttaggaaggcatggcgttccgggacggatatgatcagggagccttgggagcctccagttccagcggctgttccgcatcggccccggcgagcatccagccgccgtctgtttggatgaagtgcaggttgttgacggagaattcatttccaactgctgtacgcacgccgatggtggccttgattccggcgcagccgtctctggcggcgggaatatacgccgctttgacttcgggaacgtctttttcccttaccctggtgtgcggggtgggaatccttcccatgactgttttcaattgggagagcgcgtcttcaaattccttcacggaggcgaagttggacggggccagcatgcgcatcatggccaggctgtcccggttcgccagggcgcggccggcggcggttacggcctcttccggcgtgggaaaggacagcggaggatacgtccgatggaaatccgccatgatgcgggcggtggtggattcgtccggtttcagattccaggaagcgaaagcgtccgtcaggttcatcttgaagacgggaaggccgtctgtgggatccttggttttttccagcgcatagcggtaaatgagagcgggtttgtctatgtccggcatgctcatgcgcggcggcaggatggtcatggctccgatgctgtggatgtccttgccgttcttcttcgcgttgtttttattggcttcctcctgctggtcttcttcacggctgttcggggccatctgatcgtccggatgggggctcaggggaaccaggatggtattcggaaaggtcatgaagctgaggtgggtaggctggatatagcggttttcctcccttctgtcctggaggcgcatggccttgaccacgggaatgaggcgtgcgctctgggtaatggcggattccgtataatacggggaaacgagcagggcggcgatgagggccgggtcatcccccttcacggcccggatgagcaggttcttgagttcgtcgtccgttgttcccttgacgttttcctggcggaaacgcttgatatgttccagggcggctttaacggcggctacggagtactggtgggcgaggccgaaaattttcttcttggcctccgaggacagtttttctgcttctccccggatgcggtcgtcaaagggaaggaatgtgttgtcaaagcttccgggagtcagggacgcctgccaccggccttcttttttcaccagggccacggcggtggccgcataaacgtacgggttggccttgtccggcagcaggatgtaggccattgccaggtcgccttcggcaatgatggagtcttcatccacaaagggcggacgttccggggccgctccggtgacatacccttgaaccgcctccatgcgggaaaggatgcttttcagcctgagttggcttacaaagggggaagtggcgggcaatgacttgtacggctcgtgtttccagtccgttttttcctgaagggcgcggagcagcagtttggccgcgttcaacggcgtgctctggtccggaacgggtcccgtggacggagccttgtttcccgcagcctgatccatattgatccggaaacggacaggagcgccctctggcggctggccgccccgggaaaacccgcagcagaggcagaggcagaaaagggagagggggaggatgttcatgaccgctggccgccactatggcataaacggctgcgggtgtaaatcattcgttgggaatgttgacgcggccgttgccgcagggcggacaaccctggactccggggaaaagcgaacaaaaaggggggaaggatgcgttccggaagaagaatccgaaagccggaggaaagggctttcccgcggcgttcatgccttgaattttcgggaagaaggtctttttgcatttgccaacagcgtttaagagaggtttactgatgcgcgtatgtccgaacacaaggaaagaaagactcttgaagaacgccaacagatgtctgatctggaacggctgcgccactcctgcgcgcacgttctggctacggccatttgccgcctctggccggatgcccagctggccggcgggcctgccgtggataacggtttttattacgacgtggagctggaccaccgcatcagcacagaggattttgaacgcattgaggaggagatgaaaaaagtggtgaaggaaaaccaggttttccagaaggaagtcatttcccgcgcggatgccatgaagatggcggaatccggggagctgggtgccctgggcccccgcagtgagccttcccgcttcaagattgacctgctgaacgacatcccggaagacgaggagatttccctctaccgcaacggggattttacggacttgtgcgccggtccccacgtgggccgcacgggcaactgcaaggcattcaaaatcatgagcgtggcgagcgccttctacaagggggacaaaaaccgccccatgctccagcgcatttacggcacctgcttcccgaaccgcaccctgcttgacgaacacctggaacggctggaagaggcgcggcgccgcgaccaccgcaaactgggccgcgaactgggcctgttctgcattgacgaatccgtggggcaggggctcatcctctggaaacccaagggggctctcatccgccgttccctgcaggacttcatcacggaagagctggacaagctgggctactcccaggtgtacacgcccaatatcggcaagctggatctgtatcgcacgtccggacacttcccgtattaccaggaaagccagtacgcgcccatcccggaacgggacgccatggaaaaactcagccaggagggggcttcctgcgcggaactgttcaacggcctagccaccggcaccattgagggctatatgctcaagccgatgaactgcccccaccacatcaagatttacgcgaatgacgcccactcctaccgggaccttcccgtgcggctggcggaattcggcacggtgtaccgctgggaacagagcggagagctgggcggcatgacgcgcgtacgcggtttcacgcaggatgacgcccatatcttctgcacgccggatcagcttgccggggaaatccgccagtgcctgggcatcgtgaaaactattttcggcacgctgggcatgacggactaccgcgtgcgcctttccatgcgtgacccggaaagcgacaaatacgtgggttctccggaaaactgggacaaagcggaacaggccctgcgggaagctgcggaatggctgggggcggactacagcgaggaagctggggaagccgccttctacggccccaagatcgacttcatcgtgcgcgatgccatcggccgcgaatggcagctgggcaccgtgcaggtggattacaacctgccggaacgctttgacctccattacaccggagcggacaacaaaccgcaccggcccgtgatggtgcaccgcgcccccttcggctccatggaacgctttacggggcttctgattgaacactttgaaggcaaattccccacctggctttccccggaacaggtgcgcgtgcttcccatctccgacaaggtgacggatgtggccgccgcgcatcgaaccgccctggccgccagaggcgtgcgcgtcacggtggatgaaacgccggacaaaataggcgccaaaatccgcaatgcccgtctggaccgcgttccctacatgctggtgctcggccagcgggaggcggaagacggcaccgtctccgtccgccaccgggacaagggggacctgggcgcgatgccctttgagcaattcgcggacctcgtagcccgggaaatcgcggagcgtcatatttctcccgtgatttgagttgccaagttattccttttagtttagtagtatccggacgtgccaaccaagccaacgaagaataatgacggaaatcgccgccgtgaccgcggcgatcagactcggatcaatgaacggattcgcgcgccccgcgtgcgggtagtgactgccaacggcgaccagctgggcgtcatgaacacgcgcgacgcgctggaaaaagccaaggctctgggtctggacctggtggaagtggccggcaatgccgatccgcccgtatgccgcgtggttgattacggcaagtacaaataccagcaggccaagctccagaaaaacaacaagagccgaaccgtcaagctcaaggaaatcaagctccgcatcggtacggataccaatgactataatgtgaaaatggcccgtacggaaagcttcctggaccatggccacaaggtccgcttccagctccgtttccgcggtcgtgagaacgcccaccaggagcttggctacgacgtcttcaacaaagtcatcgcggacatgaagaccatggcgcaggtggaccaggccccgcgtttggccggcaacaccatgcacatggtgctctccccgctccccgcccagcagcgcgtgaagaaattcaccgcccacttggataaggattttgattccgaagactccgcctttgacgcggaggatgacgagtaagacggcatttttttctttttcaggctttccacccttataaggtggaaagccttttttacgggcagatgattttccatggctcttttctataatgataccagggaattttccccggaggcgctggaggaattgtttctttcagttcaatgggaatccggaaaccatccggaacgcttggcgaaggcattgcgccgttacggggcagtgttctccgcttgggatgggagcagactggcggggctggtagccgccatggatgacggaaccatgacggcttatgtccattatctgctggtgcatcctaggtatcagggatgcggtgtcggttcgtggttgctgggtatgtgcaaaagacgctatgccgggtatttgcgcatagttctcacttcctacagggaaaaggttcctttttacgaaaggaatggtttccttccggaccggacgcaggaggctgtgcgtttgattcctcctacgttcggagaaaccgggattgaacaggaagaaggagagtaatatctcaatttttctgggaaatccgcttgcggaagggctgcatgcggcacatggtggcggtgcgccagagccattccagggggccgtacaggaaatggcttagccagaggcggcaggcccaggcctggaggaggaagacggcaacggccgcgcacaggcatggccatggccccatgtcctgggccaggcccagcccccacccgaagaagaggaaggtgaagaccagcgtctgggtgatgtagcaggtcagcgtgcatttgccggcgctgctgagcagtctgacaggcaggggaaggccgggatgggtgaacagcaggacggcggcggagacgaaagccgcggtataggccaggttttcccattggtgcagaaggtgtcctgcgtccacttccagcgcggagtccagccgggaggggagtaacaggcgcgccgccagcagagccaggaacagggttccggagattcccagcatccgcaggaacaggcggcgtttgtcgggcgcgtcttcaaaggtgcgccatctgcccgccagcatgcccaggatgaagaggcccagcgtttgccagaggcggccgctgagcaggaagaaatgccatttgcccgtctgtccctgcgtcaggttccacagggccgcctgtccccagctgccgtgggcgtacaggaattcccgcgtggggcccgcagccggggaggtcgtatggaaccagccggaggagtggggccaccagtccgccagcccggcatggttcagcaggtccatgagcatgaccggctggagcaggcacagggcgcagagggtgatgagcaggggtgtcccgcatttgtagagcatgaccagggcaaagcccagaatgccgaagagggtgaggatgtccccgtcatagaacagggtatgcgccagccccagcaggaacaggagtgtcaggcgccacatgaagcgtttccggaagtcgattccctgctgctcccgcctgtccagctggatgaagaagctgaggccgaacaggaaggagaagagcaggaaggatttgctgacaaagagatgttcataggcccagtccgccgcgctgttggccgcggcctgccatccctccgccgggggcatgggaaggtacaggttgaagtggtcatgcgtgtggacgatgacgatgcccagcagggccagagcccggaggatatccagaatggtgatgcgcgcggccgggagcggcgttccggcgggagtccgggcggtcatggcgtcagcaggggcgggaaaaggatgggagcagttccgccgcacgcctcctggcccattggtctgcttccagaatgggggccagttccccgcggggatccgccggggtgtggtcgtccatgacggcctccaccagtttccagatgccggggaaagagatttggccgtggatgaaggcattcaccgccgcttcgttggcggcgttgtaaacggcggccagggtgctgttgccggctccggccctgcgcgccaggttcagggcggggaagacgtccgtgcggggtgcctcgaataccagccggccgatttccgcaaagttgagctgcttcagggagttgggaacgcggtccggccatgtgacggcgtactggatggggaagcacatgtccgagctgctcatctgggccagcaccgtgccgtcccggtattccaccatggagtgcacaatactctgcgggtggacgatgacgtccactttttccatgggaacgtcaaagagccagcgggcttcaatcatttccagccctttattgaacagggtggcggagtctatggtgattttgcggcccatgctccaggtgggatgattgagggcctgttccagcgtaacgtgttccaggtcttccctgttccaggtgcggaagggtccgccggaggccgtcagaatcaggcgggagacggcttccgggccgccgtggttgccgttcaggcactggaaaatggcgttgtgttcgctgtccaccggaagcacctgcacaccggcccggcgggctttttccatgacgatttgcccggccatgaccagaatttccttgctggcgatggccaggtccttgcctgcttcaatagcggccagcgcgggcttgagaccggcggttcccacgatggagattaacaccatgtccgcctccgggagctgcgccaggcggcacagcccttcttctcccgtttccacctgcgcgccggggagagcgcgcgccagctcgtccgctgcggacgagtcgaagatgcatacgctgcgcacgttgaattcgcgcgcctggcgggccagcgcctccacgctggttcctgcggccagccccacgatttccattctgtccggaatatcccgggcgactttcagagcgctggttccgatggaaccggtggagcccaggatgacgacgcgtcgtttctgcataacggagaagcatcatgcaaaaaatacggtcccttgacaagccggggggatgaaaattttccccgtgccgcatgggccgttttcccgtcagcccggttttattccggcgggccgggggaaggccgccacgcgttcgtgccgcaggcggtttgtgccgtgggttgctgcgttcctgctggcttgtcaagcagggagggcgggaaaagagcgggactggaacgtgaaggagcattcctccgcatggaaaagggttgtattttcctccggagggcgtataggatggcacgaatgaagcgcatcgccgtgtatgccggtagtttcgaccctctgaccaatggtcatttatggatgatcaggcagggcgcgaggatgtttgatgagctgattgtggccatgggcgacaatccggacaagcgttatacgttttcccatgaggaacgcatggatatgctgcgggtggcgctttccgacatgccggatgtgcgcattgccgagttccacaaccgctttctggtggatttcgccaatgaacacggggctacgttcatgctgcgcggcatccgttccacgcaggattacgagtatgaacgcgtgatgcgccatatcaatgcggatatggcccccaaggtctgtacggtgttcctgatgcctccccgggatacggcggagttgtcctccagcatggtgaaagggttgattgggccggaaggctgggagagccaggtgagccgctatgtcccccataatgtattcgccatgttgaaggagaagtaccgggaggtttttccgcgttcctagtggagattccggatttccgttccgttattcgctgtccggtggagagggggcaggggcggaacgcctgcgcctccttctgtctttctgctttctcatgcgctggatgacgcgggcttttgcggcgcatcggcccgtttgcatttgttccacagcatcgcacagttccctgcgcgccagaaagcggttgagttccctggatctgtccgcatggcatttgacggcgatgcccgtgggcgtgtgtctgaggtaaacgcagttgttggttttatttactttctggccgcctcgcccgcttccgcggacaaagctttcctccagatcctgttcacggatgcccagggcctccatccgttcccggagagctgccagtttttcaggcctgaccatagccggaagattgcagggtgttgacgcgctggcggaccgcatgggccagcatgtcccggctggcggccgtcatggggcggaggctgatggcagcggttgagccgtcagccaggcggaggtttagccgtccgccttcccggtccgcagagcgaatctgctgccagaagaaccattgcatggcgcgccgcgcccgcagaaagggcaggatttccactcccactggggtgacgatgacggccgcgtgtttcaggcagcggcaccccgcagtcaggcagaggacggcgggaacaagcgccgcggcctgcatggcccacaggggggcgggcaggtacggggtaattgtatcatatcccgtgagctggaggaaagcggcggtggctgccagaaggacccccgccgccgtcaggatggcgcctgcccggttccgggtgaagcgcagttccctcttttggacgggaatgtggcggatgtcttccacgcccagcccggcctggaccggacggggcgcggaaacgggagtatggcgttcaggctccggcatagacgcccgggaggatttccttcgtttcgtcggaatcgttttccatcagcagggtgccccggagaacggctccgtcctggaagtggaagcggccgcgcagggtcagcttgtccatgcctgtcagggagggcaggcccagcccgtccagggaatccaccagcttgtacaatttggaatccaggtccaccaccggggtgttgccctgccgttccggcgccagggccacgttgccgtgttcatccacaacgatggcgtccgaacggagcaggaacaggtcggaagtggtcttgacggggaagaaacgggaacgcgggacattgacggccctggctcccgggaaacattcgatgcccgcgcccatggccgtttccagctggtacaccggggcggattccggatcgcgggggttgagcgtttttttattgcggatcatgggcagcgggagcacgccgccgttggcgtccagaatttccttgagggcgtccaggcgtatccagagcgtattggtgttgaagtagcggtgcctggagatattctgggattcgggaatgtcctcatccgggcactgggccacttcccgcagaatcagctggccgtccgacttcctgaccgccaggtggccgcctttcctgtccgcctccgtgcggcgggtgacttccatgacgaagggagcgccgctttccgcaaaccagcggaggaagttcatgtcaagctgggcgcccagattgtcggaattggagacaaaggcgtatttaacgccatccgccagcaggcggtccagccagccggaccccagcagggccggatacaggtccccatggccgggcgggcaccattccagctccggctgctccgggcagctggccggggagaggccgtccgccagaattttaggcacgcggttctgcatcagttccacctgggccgggtctgcaaagccgtccgccgcgtatttttccaggtaggccagcgtgtccgcgctggtggagaaagaattcatcagcagaaggcgcaccggcgtgccggagatggagcgcagatgcttcacctgcctgacgatcaaatccaggaacgtatcctctccttttattttcagcaggcttttcgccttctggaggcccatgctcgtgccgaggccgccgttgagcttgatgcatacgcaacgggaaatcaggtccttgtccgccgcgggggtggaggccgtgatgtcctgccagtcttccacctgatcggcgggcaggatgtccgtttccggaatcatgccggagtggttggaaacaagggcttcgtaacaacgggagaaagcgttgacggccgcggcagaaacgccggcggactccatcttttccgcaaaaggagtgaacgtactcattaacggcttttgtacaaaatgcccggaggcggctcaagcattatcagcgtatccggaatgcccgcgcgttttctttttcctgtgggggctgctccggattatctggctgccgtcacccggatccgccggtagtccgccacccattgggaaccgtcccataactcatctttcagggaatcctccatttccttgaaaatctgggtgagctgttcttcttggaggttgttcaagtcttcccggaagaattggtcggcccagttgcgcaggccgtcaggaccgtctttcagcggcgtagggcggtcaaattccttcatggtttccgggcggagcccggcttgttccagcacgctgccgtattcttccgcggcgggaaagtaaaaacgcgttgtgtacgggaggttcctgcgttccagggctgtccgaaaagcttccctgatgcggagaatattgaggcgggctccgaattcgcagaccagtttcccctgcggtttcaggacgcgggaaacggcatttaagagagtcccatggtccggtatccaatggagggccgcattggagaaaacgatgtcaaatctgttgcgccagggcatgaggcgggcgtccagcacgcggaagtccatgccgggatagagctggcgggcttttgctatcatttccggagaggagtccaggccggtgacggacgccgatttctccagcagagtgtgcgtcagcgtaccggttccgcagcccaggtccagaatggactgttctggattttccggtacgcaggagagcagttccctgccgtattccgcgacaaaaccgtgtttgttttcgtaccattcagcgttccagtccattacctctccatcgtagggaaaaaagggttttttttcaagaaagaccctgtctttttttcatggtatttttcccggagggcctctgtccatttctccgcgccgtgccgggattcttcttgcgttggcgggcgggaaatggttaagataagcttactatgaaagcaacagccctgttcttggcggcttccgccctagccgcggtttccgccgtcgcctatgacggatacggttatgacccccggcccgcgagttcctataacaataccatcagcggagcggcccatatcggctatgattcccggtatgcctataaagacgtggtggcttcctccctgctgaaccgcagcggcgtgtttaacatcggcggcgagctgaacctcaacctggccagagactggaagcaggaaatcggcgcggaatacatggctttctgcgacgggctgctgagcgacaaggacgcctttgacgccagctggaaggctgtcaaagagctgttccccaatctttccttccggggcgggtatgagttgaattacggcggactcccggggtatttgagcaagcacatgggaaaggctccccattccctcgcccagtccgtcacggcggggctggcgtatgacgatccgggccacggctattttggctccctggatgtgcagtacggcttttacggcatgaccggctggcgcattgacctgaacgcgggcaagcgctggagcggtctgattcatgaaaaggtggatctggagctgagcgccggaacaggttattcttccagttactgggggcccggcgcagccgggtttgaccaggttaacatcaagctggcggctcccgtgcgcgtaacgggtgtggactccagccgcgggttccggattattcctttcatccagcttgactgggcgggaaacacccgttccgaaatccgccgctacgccggcatgaacgcgattgaggatttccgcatccgtgtgggcgtggaagccgtttaccgtttttaagcggatgctccgcggcccttttgccgggaagggccgcggaagcgttccccctttccgggggcgcatgccccctccccggcttcccttgaatcccctgccatgttgaaaatgatttttctgctggcccggcgcatgtttatacggctgctgctggtgctgcttccgctgggcctgtttatgttcctggcgcaggccattcccctttcccctctgcaatccctgctgctgctggttccggtgattgcctttgaagtgtggctcgtcatcaggcatctgctgcccgtcatgggggagctggtgaccaagacgctgtattcctccaatattactacggatgaggaagtgctggtggaggcttccaggcgcatgctgaattccggggatccccagggcgctctggaattgctggaacgctaccggaaggagaatccggggctggtgcgttcctggctcatggaatccagcctgctgaacgatatgcgccggtacgcggattccgtcaacgtccttcagaaaggactggaatacggagggtggcgcaaggaggaccgggctctgttcctgtacaagataggagccatttacgagtcccagctcaataacccggacagggcccggaagtattgggaggaagctgcggataaatatcccgatacggcctatggccgctccgcacgggacaaggttatgttttaatgcggctttccgtgaagggatggcatccggaattttttcattgctttaaagaaccgcgcgtgacggaggaataagtctttttctttttccttattttgcgcagggaaatattcttcaggggggcgcgatgccatggtggttctttctgctgagcacggggtaattaagcattgtatagatcaatgtatgtgctacgattcttccgcatttaataatcatgctttgccgtttccttggaaccggattaatttttcaactaacaggatatgagtaaaataagccatataaaatatatggtgctttgcaatcttccctaccgtttgcgggaaatcgccggacggatcgcgaagaaatgcaggagaaggaaagaccggtctcttgaagcgaagctggaggatattcgcaatttgcttatttataaccaccctatttcctctgttcccccggcgacggggaagttgaggctccttcaggacggcaatacggttttgctggccctttttgcgcgcaaatgccgggaaaacggactgcggtactggctggattacggcacgctgctgggggcggtaagacacaggggctttattccgtgggatgatgatctggatgtgagcatgatgaggccggagttcgaccgcctgctggaactgcttcccgttcttttcccccgtgaggaagggtttacctggaacaggcacgcctttctgcaaataggatatgagggcacccccctcaaccttgatgtgtatccctatcatttttatgcagagagtctttcatctccagaacagcatgagaagctggacaggcttttgagcggatttaagaaagacgtggtactggtaggttccaggatgaacctgaccgatggacaggttcaggagaaaatccgccaggatattctggaaggaagggatgctgccggggaagatgaagcccccgggatttttctttctcctgccattacttttacaaaaaatacgcacctttcctatgaaacgttctttccccttggctccgcagaatttgaggggatgatattttccgttcccaaccatgcccgccagtacctgcaatttttttacggcgactatctgtcttatccggaacgcatccagttcaagcatccttccgtgaaggccatggtggataaggttccctttgaggcggcggtcaaccgtttcattgacgtttacggaaagcggattgatgcgcccatgccatgaaaacggttattacttacggaacctttgatttgctgcacacggggcacgtgaatctgctgaagagagcccggaaactgggggaccggctcatcgtcggcgtgactacggacagttacgaccagagccgcggcaagctgaatgtcatggagagcctggaggaacgcatggaaaatgtgcggaaaaccggtctggcggatctcattattaaggaagaactggaagggcagaagatccatgacatacggaagtacggggcggatgtttttgtgattggctccgactggtcggggaaatttgactatcttcgcgattattgtgaggtggtttacctggaacgcaccaagggcgtttcttcaacagacctccgttccgcccggaatcccattgtatatatgggaattgcaggtcacggacgtatagcgggccgttttctccgggagtccaaatatgtcagcaatattgaaataacagccgttttcggaaggaatgaggagaaagttcgccgttttgcagagtcccacgctctgctggaatattatacggaatacgaacagtttctggaccgggttcatgccgtttatattgccgtcccccatcatctccattatgaaatggccaggaaggccctgttgagggggaagcatgtattgtgcgagaagcctcttgcccttgcccgggaggaggcggaagagctgttccggctggccgaggagaagggagttgttttgctggaagcccttaaaactgcgttttgtccggctttccagcaattgaccagtttggcgaggagcggcattattggttccatcaaggcggtggacgccacgtttaccaagctgataaaggatgaggctgccagggagtatgaccccatgcaggccggaggcgcctggacggaactgggttcctatcccgcctttgtcatcgggaagcttctgggaaccgagccccgcaggattcgttttgtgacctgcagaaagcctcatacgggtgtggacgtgttcactcgcgcggaatttctttattccaatgcagtagccaccgccacggcagccataggagccaagcaggaaggggatctgtgcattaccggaacggaggggtatatttatgtgccggcgccgtggtggaagacggagatgtttgaagtgcggtttgaggatacccggctcaacaggaaatattttgccaattttgaggaggatggactgcgttatgaacttggcgcatttttgcgcctgattcatggctgccagcacggcaaccgtcttttgacccgtgaggattccatgttcatggctgatattgcctcccgtttcaggagagggtattgcgtggaagagatcagttagaaagaagaggccttcttacacctgtggaattctggggtagtgccgacggaactttttcttggaaccgttttgtttcgcatgaatggaagccatcctattatttcttccgaaatggggagaatctgttcagtatggaggtgttccattccacaaaggactggagtgtaggaaccggaatgtttaattgctccgccagacagcaaatgggtttggtgcccagaggaacatcttccgtaaagtaacgggaagaaaaatcgggaatccatccttgtttccggcgggtcatgggagctttaaccccatggaatgccggaatagattgaatctttttagtcaactctacggcatttctggattcataataatctaggatgggaatgatgtcctttccgatttccatgccgggacaacaggaacagagggtcagaagttctctatctgcctggatgtacaactcactggcctcctctgtccattcttcataaaaaagaaactgcttgtcataaaacattccttccctgtagtggcgaaacagactcatgcagcgggaagggtggagaaggggattggagttggtcaacagaaagggccagggagaagaaagatgagtcagaggagtgtcaaataaggtttccaacatggcggaccaatgttcggcattatttcctggggctacccatatcctgttaagagggcggcttccgagaatggagacggaatgtccatattcctgcgtccgacaaatcaggggaaccttgtatattcccatcaggctgacggtggaagtccaagagggatcttctgccatctccatgacctccggagtaccgggtacaatagcgagcccctgctctcgatgcagatagggtttaatgcggtggcatacctcccgaatgccaaagcggggaaccgccaccagcacaaggttgcagtctttcaatatttccggatggttgctgatatgccctaggggagcatggtgcgtagtaccgtttggaaagatagcggagaggctttttccccattgattagggtttcgggttaggatattgacatgcaggccgcgtgtacccagccatcccgccatggcatgggccaggttgccgccgccgcaaatgcctatgacaggagcggaaattgtattcatcaggaggctgaagtggaacaggatgaaaaaggggattctccgttagtgggacaagtagaagacggttccgagccggtttctgcatgcatggcccggaccagggcatcattgtcggttgcgtctctgacggcgatacggatgaattctctgccttcaaatccttttttccggctgcagtccttaacaaggatggagtggtttttcagcagaaggccggtcagggagcgggctttcatggggggcttgacctcgcacatgaaatagtttgcctgggaggggaacacgttcaggaaaggcacgcgggagagttcctgcatgaagcggtcccgttccttcatgaaacggttgcacgcgcgcacgtaggattgctcgtatttcccgaagatttgcatgtagaattccgcgatggaattgatgttccagatggaaacatctttttttatccatgccgccagttccctgtctgcggaggccagaatacccaggcggaggcccggaacgccgtaggatttggaaatgctttttaccacggccaggtggggatattcttccagaatgccgtctttcagcagcgtattgtccggcattccgcaggagaagtctacaaaggattcatccacgatcaggcggatgccgcgggtttttgtccacaggcagaggcgcagcacatcgcctttcggcaggaagaatccggaagggtttcccggattgacgaggagcagggtaccgatgtctttcccggaaaagaattccatcaggtcgtccgccgtataagtgaaattccgggaagcggtatggaagggaaccaccatatccggtttcacccggttggggtattcttcaaaggtagggtagatgacccccattttcccttccaggcgggacatgagcgccttaatgagttccgccgcgccgttgccgatgcagatgtattcctggctgatgccgaagtattttgccgccagcaggctgttgactctcattccggacgggtattccctcaccaggcgttcaaaattcgccttgagttcggacatgaggcgtttgttggggaaatagggattgaccaggtaacagaaatccctgatgcggggatagcgccagtagcctccgtaccgggattccatcaggcgcaggtgttcttccctgtccggggtgaatatggaggctgcgatgtccaggtcctggatgtcgtctatttcataccatgcttcgcctccgaggcgcagcgccttgatttccggcttgtccagcagggcgatgacccgcagcacctgttcgtaatattcattattgcccagggctttgctgtaggctgtaagaaaggggacgtaatgggtccgggagaattccctgctgaatttgtaaatattgactgttttaaaatattccgtctttttcttgtaggagaatttgctgccgggaatgaattgcctgatgttgtcgtcttcatccagagtgacgaccgtgccgtccatccagctttcaaatttggcgacgagagcaaggctgggatagggatggcggagcagggcatcaataacggagtcttcaaaaatcaggtcggattcaaagagcagcgtgtcgtcctgaagcaggtgttccttggccaggtacagggaataaatattgttggtgctggcgtacaggggattgtccacatattccacaggggtggaaatgtccagccgggaaaggaaggttttgagtttttccccctcataacccgtaacaatcacgattttttccagagacggggaaaggcggtccaattgtctcatcatgcgttctatcagcgtcactccgttgacctgaatcatgcacttggtattgttccgggtgagcgctcccagtctttttcccattccggccgctaaaatgatcgcctgcataagtattctaatttgtcttcagaacctgagaaagaaccgggaactatgtttaacggattgagcatccgccgtcaaagtaaaaatttctgtaagaatatgttaatgggatattacccgggcgaaaagaaaaaaccgtcttttatgtttcatcgcaatccttttatttttcattgatttaactttggacagaatgggagaaacgtttaacggatgctcaatccgcttgttgccaataccgtggaaagggaaggataaggtctgtctgcattttggaaaaagcagcgttaatatcatggaacgggtgttttctccgaaaaggacaacttgtttttcattgacttgtaaaaagtgagggataaggttttgattctgccggatgtgctttcctggaaaaatgaagcatatcccgcatgttgttgaccaaatttacctgtgatgaagctgccatcattcattaccgccggaaggactggaaaattagtaaggggaaagcattggtgggtgacggaagtccggtgctgcggcctgaaagtgctttcttcctgcacggataggaaaaagcgtttcatccgttttttcggtattccgtgcggacggttcaaggtgggccgggaaggtgaagcctcccaattgggcaaactggtaaaatctaccgttcgggccgaggaaatgccccaggcgtccggagtgctgaggattgtgcagcaggccatgacctgttttttgaatgaagtggccgggattcttgaggagggcggttatccgtactggctggatttcgggacgctgctgggcgcggtgcggcaccggggctttatcccctgggatgacgacctggatatttccatgctgcgtgaagattatgaaaggttgagggcgaatgccgccgggcttttcggttcgcgcggtttctccgtcagtatggatccgttcatccagatagggttgccgggcacgttgtgcaatgtggacattttcccgtatgacacggctcctgccgcgtggtctccggatgcgcctgaggaaagggagtggctgctgcgcggttacaaggcatccggaatgcttgattatgaggcagattcctcctgccgttaccggacgcggtgttcctatgaggaaaagatggcgatccgggaccgggtggtgatgggaggacggcggccggcggatggaggaaacattttcctgggatttgagattccttttgccggcccgtgccgccattccttccgccatgaatggctgtttccgctttcccgcgtccggtttgagggaagggattttccggcccccaggattcctgaaatggtgttgtacggccagtacggggactggggagtgctgccggattctccccctgtgcattttgatttgaaccacatttccaaggaggttctggctaggatgatgtacatgcgtgatacggggcgccttcccgggcgcgattaaagggccgcacccttttcttcccccgcagggagaagcccttctttcttccttgaccctgctgattgaggaggggtatcattagataatgagaagacccccgatacccggcttggtgatggcggacggatggctccagccgtattcccgccagatacgcgaccgccagcgtctgtttgacctgaaaatgaagaggatcaatcagcgcgccggctctctggaggaatacgcgcgcggataccgctattacggtttcaacagagacgcggagacgggggcgtggacataccgggaatgggctcccgccgcccgcagggtgtccctgattggggattttaacggctggaaccgggagagccacccgctggagcggaatgagcgcggcgtgtgggaaattacgctgccgcctgatgcgctggcccacgggcagaaggtgaaggtgcacgtggtcggtgcggacggcacgggcagagatcgcattcccgcatggattaccaggaccgtccaggatccgaccacttatgattttgccggggagatctggatgccggaacacccctatgaatggcggaataacggttttgatccctcccgggtggaagttccgttcgtgtatgaagcgcatgtaggcatgggcggggaagaagggcgcgtgcatacgtaccgcgagtttgcggacgaggttctcccccggatcgccaggctgggttacaataccgtccagctgatggcgatccaggagcacccctattacggttccttcggctaccacgtttcttcctttttcgccccttcctcccgtttcggcgagccggaggacctgaagtacctgatagaccaggcgcacggcctgggcatcgccgtgctgctggacgtggtgcattcccacgccgtgaagaacgaggcggaagggctgaacaattttgacggttccggaggcatgtatttcctgcccggggagcgcggccgccatccagactgggattcctgttgttttgattatggccgggacgaggtgattgaattcctcctgtccaatgtccgctggtggctggaagagttccgttttgacggcttccgttttgacggcgtgacatccatgctgtatttccaccgcgggcatgagccgttcggggatttgggcgcctacttcggctcttccgtggatctggatgccgtggcttatctgcagctggccgccacgctgattcagcgggtgaagccgggcgccatagcgattgcggaggacatgtccggcatgccgggattgtgccgcccggtggacgaaggggggattggtttttcccaccgtctggccatgggcattcccgattactggattaagctgctcaaggagaaaaaggatgaggaatggagcatgggcgatatgtggcacacgctgaccaacaggcgctacggcgagccgcatgtggcctattgcgagagccatgaccaggccctggtgggggacaagactctggcgttccgcctgatggatgcggaaatgtactggaaaatggccgtggaccagcagagcctcattattgaccgcggcatggcgctgcacaagatgatccgcctggtgacgctggctaccggaggggaaggctggctgaatttcatgggcaacgaattcgggcatccggaatggattgattttccgcgcgaaggcaacggctggtcttacgaatactgccgccgccagtggtccctggtggacaatccttccctcaggttcaagttcctgaatgcctttgaccaggcgatggtccgcctggcgcaggaagcccggctgctgaataatccgccgcctttcccgcttaatattgacgagaccaaccatgtcatggcattccaccgcggcggtctggtatttgtgttcaactggtccggagacagggctatcatggattacatgctgcctgttccccagaagggggaatggcgggtcgtgctggatacggacaacgcccgtttcggcggtttcgggaggcaggatgtttccatgccgcattttacggatggggacgggaacctttccctgtacctgctgccgcgtacggccctggtcctgaaaagggtaggttccgccgtcatggcccgccgcctggggcgggaggattagcgtgcggcctcaaaaaaactggcgggtttattggatccgtccatgaaagaggcgtgcggtacgggcctgcgtaccgggcgcgggatgaataggcgctttccctgccggaacgtgtccggcaggctgttaccactgcgcgggaagttcccgcaaggggggcgctcctgaatccgcctttttcaggcggatggtcaggatgtccgttttgaagtccttggacttctcgttattgcggccccacaaaatggctccttgcgtggtcatttccggataaaacgttttttccgtggaaaggaagcccggtttatccgccgcaacgtgcacgggcttgtgcctgttcagggagagcgtgacgggggcctggccggcgtagtctccgttcacgcgcaggctggctccggaaggaatgctgcggatggtgatgtcccgggaagggctgctgcatgagaggcttgcgccgcagaatgcggagagcaggagaagatgcgggaaaaggccgtgagtcattgctctggaaaaaatcaatggtgttccgccatttttatggcggcctgcttgatctgggccgccatggagttgagggcgttcgccctggtgggcgccaagtggtctttcaggccggttttgtccagcttggacatgtccgccttcaggatttcttccggaggcaggccggaaagcagccggatgaagacggcaatgaggcccttggtgatgagggaatcgctgtctgcgtacaatttcagtacgccattgtccggttccgtgtgcagccatacgcgggattggcatcccttgatgagggagtcctccgttttgtaggcttcatccagcctgggcaattttttacccaggctgatgatgtattcgtagcgttccgtccagtcctggaacaaatccagttcatccagcaggtcttgcaggcgttcttcgtagttcatggctcggagattgggtaggatgagccgggcgggttatccccggcgggcgtctgcaagcgtggcgagcacggctttctgggcatgcaccctgttttccgcttcccggaagataacgggagcaaaatgttccagcacgtcttccgtgatttccttgccgcggtaggcgggcaggcagtggaaaacggagtggccggaggcggcatgttccagcagctccctgttcacctggtagggatagaagtgtttttccttggacagtccttccgattcctggcccatggaaagccagacgtccgtgttgatgacggaagctcccttgacagtttccacgggatccgtggtgaagatgacgttctcgcagtccagatgcctgcggaagtcttccaggggaaggtaattggtaggggctccgatggcgagcgtaaagcccagcctcttggccgcccacatccaggagcgggacatgttgttgtccccgtcccccacgaaggcgattttcatatccttccaggaaccggggccgtagatttcctcaatggtaagcaggtccgccaggatctggcaggggtgctcctcgtccgtcagggcattgatggtgggaatgccggaaaagctggcgaattcctccacctcctgctgtccgtaagtccggatggcggcgccatggatcatacgtcccagcacgcgggccgtatccttgatgggctctccacgcccgagctggatgtcatggacggaaaggaacatgggacggccccccagttcactgatgcccacttcaaaggaaacgcgggtgcgggtggaggatttggaaaagatgagcgcccaggtctgccccttcaggggaaggcgttcgtgatggccgcgttccgccttaagccggtggcccagggcgagcaggtcccggatttcgtctccggtaagctgttcgatggaaaggaggttgttcatggtttttgaaagggaataaaaacgggaaagccgcaccatactccctgttttcttaaaagaaaagggaataatgcggctttccagggagggatggagatgcctttacagcctggccgccgcctggtccggccacggtacgggagcgccttcacgggctccggcgggattattctttttgtaggtgggcatttgggccttgcgctccttgagcagggcggtcatggtcctggccatggccttaacgcgttccggctgctgttccgccaggttgtgctcctcgctgatgtcctccttgaggttgaagagttcgaacttctggtcagggtgccagtagataagcttccagtccccctggcgcatggccgtgctgggggaataacgggagttgtttccgttcccttccccccatacgttgggcgtgtggaagagcagggggcggttgggattcatgctgccgcctttcagcagggaaacaaagcttttgccgtccacaacctgaggcgcctgaattttttttgctcccgctatttccagaatggtggggaaaaagtcttcaatgatgacgggagtggcgcagacgctttccgcctttgtgaccccgggccagtagacgatcatcggttcccggatgccgccttcccggttggaacccttgccgaaactaagcgggtaattggattccttgttgcccatgcgtccgctgatggcaaggcccccgttgtctgccatgaagatgatgacggtatttttatccagattgttttttttcaggtattcccggatgtcgcccaggctcttgtccatcccctggatcagggcggaatagcgtttttcgttgtcggaccatttatggccgtcattggggttggagtactcttccgcaaatctcttgtcatagccgcgcatgtcgaagggggcatggatggcataatgggacatgtacaggtagaaaggcttgtccgcctccctggggtttttccgaatggcgtccaggcgtttcagcgcctcttgcgtcagggcttccgtcaggaatgtgtcgttttcatagtaattattttcatccagtccgcggacatggaaattccccgtgccgtatttccgggaaccccggtagtccgccgggccgcctatttccgtgccggcgatattgtagtcaaagccgaagagcctgggattggctccgggcgtatttttggagccgaaatgggcttttccgcagtggatggtggtataaccctgttttttgagcagggcgggcagcccaagcacctgggtgaagggtttttccatcctgtactggattttttcttccgtcaggggaagatgggtggttccggatgccctggttcctgtcggctggatgccgttgacgctccagtctgagggagccttgagcgcttgatggcctgcgtccgtggtttggtcacgcaggagcgtccagttcgtgacgcggtggcgggcggagttcatgccggacatgaggctgcaccggctgggggaacagataggctgcgcgtaggcattcgtgaataccatgccctgtttgcccagagcctccatgttgggcgtgcggtagcgcttgttcaggaaagtaggttttggagtgccgtcctcttcccgccaaaagggcagggatgtatcctgccagcccatgtcgtccaccagaaagaggatgatgttggggcgtttcggttctgccgcgcgggatgattttacggaagctgcggaagcggagcaggcgcttcccagcaggaacgggatgagaaaggctgcgatgcgggaaatgttcattactaaaaatgaccagtacttataataacgcatgagacggacgtttctgtcaaggattcgtattcccgcggcagtttgttcgggaacgtcctgtttttccggtgcggcgtgtaccgggatggaagagccttattcaaacagggccggataggatttccgggccagggccgtgctcaagtccacgatagccctgctgttgggggcctggagcgccttttgggccatgtcccggcactggccgtagtccagattgcggatggcataccggatgatggggacaaggtggacgcccacggacatggaggtggcccccaggccgatcagcaggggaagcagggtaatgtcccccgccatttccccacagatggccgtgggaatgttttcccgttctccggcggtgatcgtcatatccatgatgcgtatcacggcaggatgcgtggggcggaacatgttggcgacgcggttgttgacccggtccacggcaatagtgtactgggtgaggtcattcgtgcctatggagaagaaatccacctcgcgcgccagcacgtccgtcatgatggcggcgctgggcacttcaatcatgatgcccactttcaagtcccgcgcataggggatgttcttcctttccagttcttcccggcattcctggaggatgtgcttggctgtgaccacttccgtatagccggagaccatggggaacatgatgccgcagccgggcgtgtccgcgcaggcacgtagaatggcccgaagctgctgcttgaacagctccgggcggctgagggagacacggatgcctcgccagccaaggaaggggttcggttccggagtgcggagctgttcgcacggcagcttgtcgccgccggagtccagggtgcggaagatgacgccgtggggggagcaaccttccgccagctttctgtagtagcgcgtttgttcttcttcatccggcatgccggatgggttgctcagcagaaagaattccgtgcggaacaggcctaccccttccgctcctacctccttgatgccggaatattcatgggggaactccacgttgacggacaggcggatgttgcgtccgtccctggtgatggtgggcaggtcgcgcagcgcttccagcgccttgtaggccttttccttttccacttggaggcggtggtagtattcctccgtttctttcgtgggtttcaggatgagcacgcccttgtagccgtccagaatggcgggtgagtggctttccactctcagaagggcctggtcaagccccacgacggcggggatgcccatggagcgggcgagaatggctgtgtgggaaacggaagagcctatttccgtggcaaagccgtgaatcaggctggcatccatggctgccgtgtcggaaggagtcaggtcgtaagccaccagaacctggtctttttccgtttcttcctcgtcttcaggaggttctgtgctgcggaggttgttgatgacccgctgcatgacatcctccatatccgccgttttagcgcgcaggtaggggtcgtccacacggcgcagaacttccatgtaattctgcatgaccacataaaagatgtgctccacgttctggaggcgcttgagcagttccgtctgaacctgctggaggataattttgtcctgaaggagaaggatgtgggcgtcgaagatggaggcatctttctctccggatatctggatcatgcgttcccgcagcgtcctgatttggtccgcagtggtttgcagcgcccggtggaagcgcaccagctcagcatccacttcttccggggaaatatcgtacgctacgggttccttggaaccgctgatttgaattttaattttgcccagggcaatgccgggggaaacgggaatgccctgaagccaggtttcttccgttgaaatgggttcctgaatcatctgcgggcttgatggcccggtctcatatggccgtgagccggagtgttcaatcttcttcaaacttgcgggaaatcaggtcttccagcgcattcagcgcttcctgttcgtccttcccttccgccgtgatggtgatcttggagccgtggcctaccgccagcatcatcaaacccagaatgctcttgccgtcaacttcctcgccatccttctccacgacaatgtctgcatcaaatttgctggccagtttgacgaattgagcagccgggcgtgcgtgaatgccgagtttattgatgatggtgagttccttggtgaccatggaatttgaagtaaggggtgataacggttgctacaacggtaagtacactaattaaagtttttttccaagagttttttgtcagtcctagttttcggaggattggaagtttgacatgaggcggcggttgaactccccggccatgtcgatgcccatgtccttaagatgatagtccatggcggctacttccaccagcctggcaatatccctgccgggagccacggaaagctggacatggagcactttttcccccaggacgtccagcccctccctctccaggccaagtctgtccagctcttcctggtccttggcgggaatgagggtgacgatgagatccagacgcttgttgtggcggatggatttcaggccgaaaagggtggtgatgttgacgatgcccaggccgcgcacttccataaagccgcggctcatttccggggcgctggccaccagttctccgcccacgttgcgtacatacaccatgtcgtccgctacgagggccgcgccgcgttcaatcaggcccagggccgtttcactcttccccacgccgctcttgccgcggatgaggacgcccactccgcgcacgtccaccatgcagccgtgcagggtgacgctttccgcgaattcgttttccagaatgatggtggcggagttgacgaatttcatggtcaccaggctcgtgcggaagacgcagacgccggcttcatccgccagctccacgatttcccggggtggattctggtcacgggagaagacgatgcccggcacctcgcaccggaacatgcgctgaatgcgcgatttgcgcatgccttccggcagtttttgaagataggccagctccgcggagccgaaaacctggatacgtttgttggcaaagtaggagtagaagccggcgatcgccagcccggggcggttgagggcgggttcgcagatatggcggctgaggccggcggggctgttgatgagttccagttgaagggcttccttgtacttgccgtaaaatttggacagggtgacgaaatccactttcttcactttggatttgctgaacataatcctatataaagaaacaaaacacacgcgagagcaatcaaatattgttcccggcgccatgtgcgggctccattttttgaaaaaaggtccgctccggcatggaatgccacactttaccggttgatttgaagccccagacatggtctgatgaaggcatgaacagactggatcaattagccaccttgttgagatttccaagcatttccgcacagaaggaacacgcccgggacgtgagtgattgcgcggactggctggtagacaaattgtccggcatgggattggaagccaaggcctgtaaaacgcccctccatcccattgtgctggcccgcagcccgcgggaggaaggaaagcccaccgtgctgatttacggccattacgacgtgcagcccgtagatcctgtggaattatgggaatccgacccgtttgaaccggaagtgaggggcgggaagatttacgcccgcggcgctacggacaacaaggggcagctgttcgcccatattctgggcgtggaggaattgctccgccagaacggaggccaccttcccgtaaatgtgattttccttctggaaggggaggaagaagtgggcagcggcagtctttcccagtttatcaaggagcacagggaagagctggcctgtgacgttattgtggtttccgataccggcatggccgctccggacacccctacgttttcctacgggctgcgtggcctggccggggcggaaattatcgtcaaaggcccttccgcggatcttcattccggcgtgttcggaggagcggtggccaatcccatcgccgctcttgcggaaataatcgcctccttccatgatgaagaggggcgtgtggccgtgagagggttttacgacggcgtggaacctatagccacatgggaacgcagcatgtgggccacggtgcccggcatgagcaatgaggaactggctcagctgacgggcgtggaaaccgtggtgacggaggccggtttcaccggagcggaatgtatttttgcccgcccgacgctggaaatcaacggtatcggaggaggttaccagggtgagggaagcaagacgattatccccagccatgcctttgccaaaatttcatgccgcctggtgccgggacagcagcctgaaaggattgaaaccctgctggaagaacatgtaaagaaacattcccccaagggcgtcacggtggaattcaggcggggccatggcgggaatgcttacgtgtgcgatccgaattccgagttcggtcttgccgcccagcaggcgctggaagaggcttttggccgcaaacccgtgctggtaagggaaggaggcagtatcccgatcattgaagagatgaagcgcgtgctgggagcagatgccctgatgctgggcatgtgccttccggatgcccgcatccattcccccaatgaaaactttcccgtggatttgttctccaagggcattgacatgagccagattcttctgcgccgcctggggcagatcaagcattgaccttttttatggaccagcctgtagccgctgaaatagtcaacctgcacaagacctttaaaacaggtcttggcaaacccgtggtgcatgccgtgcgggggatagacatgaatatccggcaaggggaggtatatggactcattggcccgaacggttccggcaagtcaaccctgatgaaggccctgctggggctggtgaggcctacggaaggttcctgttccattttcggcaggtccagcctggctccggacagcaaggaggaagtgggctttcttccggaaaatccctacttttacaaattcctgacgggggcggaaactgtttccttttacggcaggctgtgcggcctgagcggaaaatccctgaaagagaaagtcagggaactgctggagctggtgggattggctgatgcggcggacaggcggctgggcggctattccaaggggatgctccagcgcatcggcatggcgcaggccctggttcagtccccccgcctgctggttctggacgaaccgaccgccggcgtggatcctctggggtcgagggatatccggaacattatcgaaaacctgaaagggcgggggatgaccgtattcctgtgttcccacctgctggaacaggtacaggaggtttgcgaccgggtgggcgtcatttttaaagggctgctcattgcggaagggtctgtgaatgagctgacgcgggattccgacaagcaggaaatacttctggaacatgcttccccggaattgatggaacggctgaaggagatggtgaaggaagacggccgtgccgtttggctggaggatgggcatccgcgcaactccctggaaagcgtatttctaaaaagtttgttggaatggaaggaaaagcatcccaatccggaaccgtaagcggtccggcggctgccaaacgggaagtgcgccgcatgatacgtgaaagggtgggcggattggatgccgccgcccgggaggccatgtcccgttccatctgcctccgtgtgtcggctctggtgcgggagaggaatttccggcgcgtggctgtttttgccgccaggccgggagaggtggatttgctttccctgctggatctgtttccggaccgggaatggtacttcccgctggtgcatgaggggagaaggctgagttttcaccgtgtatgccatcacggggaattggtggcgggcagctggggcatacgcgaacccggtccgggatgtccggaactgcatgctggggaaatggatttgatcgtgctgcctggggccgcatttaccagggacggcaagcggctggggtatggcggcggattttatgatacgctgctggccggcccggctgctggggtgccgctggcgggagtctgcttcccctgccagcttctggacgatctgcccatggaagcccatgacaggcatgtggacatggtgattgcgccgggaggggagtcacccttccggagaaaaggaaagaggctagatacggaaccggtgtttctgcacggtcagtttataaaacaggtcgtagcgggcgttgagcaggggctggaggtattctacccctccggctacctggccgcggatgtccgcatacagttttcggtagtcggaaagtccgctgatcatggcttcatacaggggggtgcgcaacccgcattccacggcaatgtgcatttccgccgctgcggccacgatctggcgggacaggcggaactgcatccaggccagccccaggttgccgcccacccagacggccagggccgcgcccacgcaggcgaaccctgctgcgtactctccgaaacagcccagcagggctcccagaatcactagaaggagcatcagcttgatttccgtcctcatcacatcctcctgatccagaaaaagcttgctgaggcacggcttgatgccgaagtccttcaggggcatgtaaatggaacgtcccagcctctccttgtacacttccagatccgtctggagctttgcggccgggaaatcccctatgtcgcagtcccattgttccttcacgcgcgggcgcacatggttccaatgcgtctggcagatgttcaggaattccttgttgtaatacgcgtgccgttcctcaatgccggatttgaccagctcataaaaccattcgtcaatgacgggaggaagcttgtgcaggatcatcgtgcgccggatggataggaaacgccccatctggcgtgccgactttttccccagacgcggcacgcagtcctgcacgtattgcgcgtacgccttgaggcgtgccggcatttcatcctccatctggagctggatgcggtcgatttcccggtcaatagacgtcaggaagccggaatccatcttggaaaggcggctcagttcatcaagcaccttcccctgttcttccagaaggctgtccgtagccagcaggaggcgttccacgcgcttgtccgtcagcgggctgcgtttcagcacttcctgaacgcacgccgtcagggcttccactccttcccctgcatgctctccggcggtcgtgacagggtacaggggcagctgcacgcccaggcattctcgggaggtggagcgtagctcctctttcaaggattgaagcttctcaaaggagagcagctccgcatgggtgatgacgagaaccatgcgggaatggagacgttcctccagcgtccggagatagtcccacagggcggaatggttgccgtcactggcggaaataaccacaaggatggcatccgatttgggaacgatgtgcttcagctttctgggggcatcctcctgttccaggccgatggtatcccagaactccaggttgagcagggcgtccgacgggtaaaaaaggtccagaacccattcatgggtgtgtggggcgggatgaggcctgtactgccagcggaccagtgtggcttcactggacacgcgggaacagaaccgttccccggccagggcgtccagcgtagaggatttgccggaccctgtcatgccgatgacggtgacattctgcggagagcagcattcggccagggcttcctccaccttttcctgggaatcgaaatgacgatcggggccaatccgggcggaaaacgccgcggcggcatccgctacgtcccgcaccgcatgcggaatcacgttttttcctcctgtcagcatggggtgatgaaatcaggtctccgtccgggctgttccggttttccggaacaaacctacacgccgcttttccttctgtccaactaaaatcacgaagcgggagcgtacgagcggccgccgaaaatggccgtccctacgcggacgagcgtggctccttcctctattgccgtttcaaagtcgtggctcatgcccatggacagttccgtcagcgtggctcccccgctgccggacaggactcccttcagctcccggagacggcggaaatagggccgcgcctcctccggattttccaccggggggggaatgcacataaggccggcgatttcaagatggttcagggaggacagctccggccattccttttccagggtttccgggaagaatccgaacttgctgtcttcattgcctacgttcacttccagcaaaatgcggggccgttttcccgtttcctgagccacggtatccatgaaccgggccaggcgcagggagtccacggcatggatcagcgtgaaatattccagggccttgcgcaccttgttgcgctggagggggccaatgagatgccattccgtatccggaggaagggaagggatttttgccagtccctcctggaccttgttttcaccgaaaatgcgctggcccgcatcatggcacgctttcacatcctctgcgggaaaagttttgctgacggcgacgaggcggacggaacccgccggacgtccggcgcggagttccgctgcgcgtatgcgggagagaatatgttccagattttgttggatgctcatgatggatggttcagttcagggatggctgtgcggacgcgtggctcatgatatggtgcaggggagagagccgccgcatggccatggcccagaccttggaagaatccgtttccaggcagatgtccggcaccatgggggaaacataccaggctcggtcattcagttcccggcgtagctggggcggcgtccatccgctatggcctacgtaggcgcgcaggatggcgcggggatcttccaggtattccagggcctgttcctcttgcagatgaaactggacgcgcaatttatcctccgtgcggatgaaagcggcgaagatgagctggttgcgttctacgggccctcccttgaagatgggcacggcgtaaagggattccggtatttccgtatggcgggctacgtctcccacattcatgccggacggatgattcaaaatatggccgatgacaaattccttctccgcccggctcaggaagatgacggaatgatggaatccggcgctatccaggtagggggcggcgaccagaaggtgccccgccaggttttcattgctgatatcttcgtgttccatcatggccataaatctacgttaccaaatgtgacggatgcaggcaaccatgcgttcaaacggccatgtcaggaggcggcgaaaacggaacaccggaaaaacaggagggaaggggagcttttacccgagtgtatagcgggtccctccggaggaacggacggcggttctggaatttccggacgtcctgcgggcaaccgccctcctggcgggaatggatttcttcccggttgaggccgtttgcttgcgggaaagggcaacggcgggggggcgggaagccctgcggcggtgggaaatgacggaggccgtattagcgttctccatgcggtctggagcggaagccatgaccagcagggaagaatcctgcattttttccgcctgggccagggctttcagggaggcgtcaatggaacagcgttcgattacgaccgggtctccggtacggagcaggttgaaggcctcatatacgtcattgctcttcatccggacgcagccgtaggaggcgggggtgccgatggtgcgttcctccgccgtaccgtggatataaatcaggcgcgagtgagcgttccggttacggggttccagaccttccagccacatgatgcgcgtgacgatggggtcccgccccggagaattgggcgcgacgcattccccggtgggcttgcggcttttaaacaccatgcccttgggctgtccgctgccgattttggaagcgatgcgatgggcgcccagaggagtgcggcagcttccctttctgtctcccaggccgaatttggaagtgctgacagggtaggttttcaccacccggccattgcgcatgacggccattttctggtccctgacgctgacgaccgcgccgtctttcacgatggcggtgggctcataatccggacgggaacaggatgccaggactccgaacacagcgaaagctgcgccggcgagttgaatcaggcgtgctgcttgcgagagaggcgcaggcatgggaaaggcgtcagttcttggctttggcagtttgcttggcgggcagcaggttggaaatcatgcggcccagggaacagaatcccgtgtaatagaaacccaggaaaggaatcatcaggatgggggaaaggtaatggccctggcggatcatgatgatgatcaggttcaggaagaaagttccgcaggcgatttccagaacaggaatgacgacggatttaatggcccggtacccgttgcgtttgagctgggagacgtgccggcggtcttccttccggtccacgccgtatttgggcgtgcggacgaaggcggactgatggccgaagatggcttccagaacagccttggcgttgttgaccgccatgcccacgctcagtgtgagaaggagggggaggtacggcagttccttccaccaggatttgggacgcaccacgatttgggcgctcatgtaaaagatgcagacggccacgctggtcatgaaaaacagggccacattcacaaaccacatgaagaccgtttcattttccggaatgcgctgcgtgcagatgggatacaccaggaagcagagcaatgccaggagcagataggaataattacaggtgaggtgggtagtggcttctaccttggctttaaggggggcattggagcgccagatgtccagcaggattttctggcagacctgaatggaacccttggtccaccggtgctgctgggacttgaacccgtccatgtccacgggaagttccgccggggtaacgacgtcgttcaggtagatgaagcgccagcccttgagctggacacggtaggaaaggtccatgtcttccgtcagggtatcatgggaccagccgcccgcgtcgccaatcacgtatttgcgccatatgccggcagtgccgttgaaagtgaagaagcggccggaacggttgcgggccgtctgttccatggcaaaatggccgtccaggtacatcccctggatgcgggtgaggagattgtattcacggttgatgtggccccagcgggtttgaacgaggcccacgttttcatccgtgaagaaatggatggttttttgcaggagatccggttccggaacgaagtcagcatccagaatcagcaggaattcccccttcgctactttggtagccgcttccagcgcgcctgccttgaagccggtgcggtccgtgcggtggatgcagacggcgtcaaagccgcgggactttaattcctccaccttgcggtagcattgttccgtggtgtcgtctgtagaatcgtccagaatctggatttccagcctgtcctgcggataatccagagcggctacggattccagaaggcggtccacgacgaacttctcattgaacatggggagctggaccgtcacgacgggcagttcctggaagcgtgctttgggctggggcttgttattgcggtttttccagtacaggtaaacgatgctcaggcggtggaagccatatcctgccaggccgacaaggaccagaagatagcacaaaagccagataaaattgtaatttaaagacatgcaggggttacaaagggggttggtatctttttgcgtcagggaagggggatttccttgacgtgacgcccgtataggacaccatagggcgagagtcaagacatattccgttttgcttaacctttttgagtgttgttatgaagagattgtatctgctggccgcagctgtatccgtcacggggggaatggcgttttccgctccacaagaagatgccccggagaaggaggcggcagtactggatgtgcaaacgccgccgtccggcaagcaggaccagccggctattccggaacgcctgctggacgactcccacatgaatgaggagctgggcatcaacgaatttaccgcgccgtccatccgcaagatttttgaagatttggaggggcttcctgaaataccggaaaaggtggccctgcgcgcacgcccggagcggcctcccatggaccgctgttccctggctctccagttgggcggcatgatggcggacggcttcgtaatcgtgcagtgcggcaagatgaacgaggtgaaacccattgccctggatctttccagctatgcaaaggccattggagccggagaaagggtgaaccgccacgccgccagcctgctgaaaaatgcggaagacggggatttgagcagtttcaaaaacaacctggcccttattcaatccgatgtggaacaggaactcgcctccctgcgggattccgatatggcgaacctgatcggcctggggggctggatacgcgccctggacgccgctacggcggctctggataacaaatttgcggaggacaaggcgaaagtcattttccagccggatgtcccggaatattttcattatattctggacggggtggagccggaaatgaaggaacgccgggacattgccaaaatcatgaaccttctgacggtcttgcaggagcagatgacgctggctccggacgccaaacccgccaaggccggcgtggaagccatccgcaaaacgacgctggagttgctcaaggcggctctggcccctgtggaatcataattcctctctccggcaggcatacatctatggttcttccccttttgaccagtctggaagtgcgtcttactccccgcagcctgtacttgcggaatgaaaaactggagcggatggttcgggatgatggccgcatccccgttccttacaacgtaagcatccgcaatgcgggagacggcgccgtgcgcatcatcggcaaaaagtggaccgtccgttcccatgaagacggcacgcaggtgattgaaggggatgaactgttcggttcacgtcccctgttgtgccagggacagatttttgcgttcaacggccttcagatgcttcggctgccggcgcgcatccagttgactctccttgtccgggacgaggcgggaatcctttatcatacggatcccgtcagccttaaatggtgaaataaaaagccctgcaaattctaatatgtccgaatctaattttaagaacagcagtcaagaaactgattcattgggttactttccctctttggacgaatacaatcccggaattactgcggatatgtgggctacagccttagatgatgataccgttacatatccagaaaatctggatatgtttcgaaaaattatggaattgggtggagaaagtacctgcgcgcatttagccgaagtatatgggaaaactccttcatactataatgcgtggggaacccagttcagcagaagggtgaaaaagaagtacagctgtcccaattggataaatcgagaagatggaactgaacgatggaaaaatgaacgatggaaaaactggtgtattccttttgttggtcgctatgtcgtcgaaaacggaaaagagcgtttttcttggagattgcgagatgaattgaaagaggcacttatgaatatggatattacaatgggttctttgaaggagaaccccgtaaccgatgttggtttgaacaccatcttttacggccctccggggacaggaaaaacttatcacacggttatttacgccgttgcaatcattgaaaataagaaatggattgagatagagaaggaaaattactctgatgtattggagcgctacaatggatataaggcagagggaagaattgaattcacaacttttcatcaatcttatggatatgaggaatttatcgaaggaattaaacctgtcattactcctgaagatggtattggtggaggaataggtgacattcagtatagtgtgcaacctggtatatttaaaagattctgcgagaaagcgcaacggtcgagcacattaagaaagaaaaacttcagttttagagaatacccgaatatctggaaagtatctttatggggaacaggtgataaccctgttcgttcggagtgcttgaaaaatggccacatccgtatcggatgggacgattatggtaaggacattacagatgaaaccaattttgatgatggtggtagagtagttctgaatgcttttatgaaccgtatgcagatcggtgatattgtgttttcgtgttacagttctactacgattgatgctattggcgttgtcgtaggtgaatatgaatggcatgatgaatacgataacctgaaacggttgcgaaaagtgaactggattgtgaaagatattcaggagaatatactttccattaatggcggaactcccatgacattggcttcagtttatcgtctgtcaaatgtgacggttaatgatgtgtatcagattattgagaaatatgattctactccacctgcttttgtaaccgatagtcatgacaacaattatgtcttcatcattgatgaaatcaaccgtggcaacatttcaaagatttttggagaactgattactttggttgaaccgacaaaacgctggggaaatccggaaggtatggaggccgtgttgccttattctcaaaagtcttttggtgtaccgaaaaatgtatatattataggtaccatgaatacggcggatcgttccatttccattattgatacagctttgcgccgtcgattcttcttcaaggaaatgttgccgaagccggatgtcttggctgatgtaagcgtaaaagatttgtctgtcagtggtttgcttgcccgtatgaatgaacggattgctgttctgtatgacagggaacatacgattggtcatgcatattttatgccgctgaaaaaaaatccgacgattaaaaaactggctgagatttttacaaataacattattcctctcctgcaagaatatttctatgaggactatgaacaaatccggcgaatacttggcgacaagtttgttattgaaactaagtcgaaagacttgtttagtcgagaagatgttgtggatgataagtgtagctatgatatcaactatgctgcatttgatgatattgaatcctatcgttccatttgaaatgtaaagggaaacgaagttagagtgaactctttttatcaaatcaaagaatatgattcgtttatttctgataaagaaattgctggatataagactttgcctgagtctattttccagcaacttgaggattttattctgactaatcgcagcaaggataccgatgcactggagttgatgggactttctgcaaaaaagggcatcggaaaagtaatcacggcaaaaaattatgtcggtatcattacactgaatgatgggacaaccattgaaatcttgcccaaaatttactcggcaagcatggacgacaattttggtgccagaaccaaacgagtgttgctcgatatgctgagaacactacggaaaatgccttttaagtctttgcagaattcttgtgtgaatattgaaaaaatgaatatctttgaaatattcattcgaatgttcgtgaacgaggttttcttcattgtgaagcgtggtctcaaatgcagttatgaagcaattgcagagaacacaacattttttaagggaaagatactgttttcaaagcaggtcaagttgaactgttttcacaaagagcgcaactatgttgaatatgaagcatttacagccaaccgtccggaaaataaattgttgaaagcaacattgatttatctctgcaaaaggactacatcttcaaaaaacagaagcgatataaaaagtttgctgagtgtattttcaaatgtggaggcttctactgactataaaggggattttgctaagtatattagtgatcgaaacatgaaggattacaataccgcattgatgtggtgtcgagtattcctgtcgggcaagagttttacttcttttgctggatcagaaatagcgcttgcactgctattcccaatggaaacactttttgagaattatgttgcagctgtactgagaaagaaactttctggaagtggctttacagtttcagttcaggacaaaacctaccatctattcgatgagccaggtaagaaatttctgatgaaaccggatattgtggttagacgtaaatctgacggagtttcttttgtgttggataccaagtggaaaattcttgatgctggcaaagtgaactacggtattactcaggctgatatgtaccagatgtttgcctaccagaagaaatatggggcggaacgcgttattctgctttatcctgaaacagagaaaatatctctggaggacaatatcgaatttagatcagatgatgatgtagttgttcgagttcaattcattgatttgtttaacgtaacaaacagtattgcagaggttatacaacaatttgatgtaatagcagtttaatcatttggcaacaaagatgtgttctttttgcgtttcttcgcagctatcattgcgaatcagcgaacggatttattaatcattcacctcggacgagtttgaaagatgggtaacatgaagggaacgttatttagacggtctcttctatttcattttaagagtacgacaaaggaactcacgatgatcctgttgagaaatgttttcccggaaccttgctatttctctatttttacaaaaacgggcggtcttgccgttttcatgccgagatattataaataccccaaagcgttgtcatgttactaaaaccttatctggacgatgaggtgtagaccaactttatcgccgaatgaaactgtatgtaatgaatcaatctgagttaaatccataaagatgcttccgggctaaccttcttcatcatccccgtggttgaggatgaagttcaggtcgtcaatgcccaggctggaggtaaacccttcgtcacccagcacgttggcgacgagctggtttttctgatgctggagaatgcggattttttcttccacggaatccttcgtcagaaggcggtaggcgatcaccttgtttttctggccgatgcggtgcgtacggtcgatggcctggctttctacggccgggttccaccacgggtcatacagaacgacataggaggcggaagtaaggttgaggccggcaccgccggctttcagggaaagcaggaagacggaggggtccttggtcgtctggaatttttcaatttctccgcggcggtccttggtctggccggtaagatagttaagcggcctgttttccgcttccagcctgttcttgatgatttccagcatggaaacgaactgggagaagacgagcactttgtgcccttcttcccggagctggtccagcaggtagaagagggctgtcattttggcactgtcttccttggcgtatttgggatccaccaggccggggtggcaacagatctgacgcaggcgcatcaggccctgcaaaatggcgaaactgttctttttgacggattcgtccgaatccaggccgagcagggcctgctgtatgcggcggagttccgccttgtacagctggctctggatgccttccattttggcgtacacttcttcttccgtcctgggaggcaggtcttttgccacctgggatttggtgcggcgcagcaggaatggtttcaggcgcgcggccaggcggttctggctctgcgggtccttgcgcttgtcaaagcgcttcttgaagtaggagcgggaaccgaggactccgggcatggagaaggccatgagggaccacatgtccagcaggcggttttcaatgggtgtgccggagagaacgagacggttgtaggaaacgatttcccgtgccgccttggctgccttggaatccgggtttttgatctgctggccttcgtccagaataaccgtaagccatttgatttggttcagggtttccccgcagacgcggagctgggcgtagttgaccacgaccatgtcgtaattcttcttgatgtcttccagattggcctggtctttgctgcggatgacgaggacgcgcacgcctggcgcaaatttttccgtttctcccgcccagacgtccagcacggatttggggcaaacgataagaaccggagggatgacgacttttttcttggatttgtttttgcgggcgaattcttcacgcagccagaggacgtaagtgatggactggatcgttttacccaggcccatgtcatccgccagaatgccgccgaacccgttcgtggcaaggtaagccaggaaatggaacccttccacctgatacgggcgcagggtggcctggagctgggagggaacatccggcttgacgtcgatctggatttccgcggtacggtccttgatacgtttccaggcctttggatcgaacacttctgcggctttcgggtccgccagctgcatggcgtgcatgcggtgggtttctccggaaagatcgaaggggtccaggcccaggcgggtaacggcgtcgcgctggtcattgtccagtttaatttccaggcgcatccatcctccgtcgtccatgcggacgtaaccgcctctggcggcgaccagggcgcggatttgctccttggagagctggacgccttccacatcaatgacgatgcggaggtcaaaccagtcgatttcctggttgactacttcaaaccgcacggcggcggccaccggatccgccagcagcgtcttgagcttgtcgtccatattgacggtcagctctttcggaagctgtttggcccattccgcgaatttttcggggaactggcgggtgacgcgggccttgaacgcgcccacctggggatcgtaggaaaagcccatttcttccagcaggccgggaatgggataaaggtgctcccggatgaagcgcagcagaactttgttcttcatgggctcctgatgggatacgtcccagccgtccttgccgagtttttccgtgcggtagccggaagcgtccctggcgcttacttcgcagagcacgtgttccgtttccgcagaggtgaggccgcggacgattttcatgtcaaaggtgccgcgcagatcgatgtccaccacgcggtcttccatgctggggggcagggaagcgcctattttacggaggaattccaccccttcaaggctgtcgatgacctgtttgggaatggagtagcggggttccacttccgtgctttccagccagcggggggggccgggaaagacggtttcgtcagactggtacagttcctgctgccccggaagctgccggacggagtgggagacgttgatgccggtggaagttgcaagctgaagagcgtagcagtccggttcaatgggatcgtccaggcaaatccatttgagcggttcgtccaccactttgaaatagttttcatcaaggttcaccaggtagcctttcagggcgggctggtggaaaagtttgttcatcagggcgcatgcggcctcctggtccagatccagtgtcagggcgtcttccgcacgggcgtagtcggacagggagacgagcaggatttccgtctgggcgtccatgcgtacggcagcccgttcatgcagattttccagatgttccagatcctgtttttcccggacgggaatccagtcctgcttcagggaatggcggtattcgaaatgtccctcgttaatagtggaaacaagcctcatgaacagttctccgcggggcggctgcggggggcgttcattcacggattggatgcggtcataccaggtgccgacttcacgggagcgctcccattcatgaatcttgcgctggaccttttccagatccgtaatggattccatgaattccgggtagggcaggcgtttcttgttgaaggcgtaagcaatgtaattccagaattcgaggatgtttgtgggaggaacgggccacaattccagcgggtcatagctgacgatttcccatcggggattcaggcgcaccatatcatggtcgtgaatctcctgttcaatggcgaaacggcggtagcgcttttccagtttgctgacatagtccgcttccttgtcgtccagttcgcgtcccagtttctcttccagaatatccagaagaggaacatcattcagttcgttcggggattccggaaggtcctggccacggtacatgcgctccagcatggcggcatacatggccgctccggccagatcctcgtcttccgtggaacatgctccgaaccacctgttgccctgaaggcgcagattcacgcggtgcacgccgtatgtgtcttccactcggccctgaatatataaatgattgccaaaaatttgcgtgactgcgccatctttctggagcttctcgccgcgcagccggatttcttccggaaaggcattgagaaagttcagagtagccctatccgggttaagtgccatgctcataatatcagactgtcatataaaaattggaaacaaacgttccctgtcaagggacgctacaggtctatgcactttactatggcacaaaaagcggattagagcaactattctctgaaaataattccaaaggttgtttgtgatgatgtttacgatgttgaatgacaaattgttatgtctatatgaagaaggccggtttttgaagaaaacgaacatattttatcatcttggaaagaaaggatgtcagttttgcgtaacatggttcttgacaggttcgccgtaaaagcgtcttttatgcctgaaattttatgtcctctgcatcacttctacagttactggcgactcaagcccgcttgagcgatggcgaattggccgaacgtcttgacatgactgaagaagccgtgcgagcccagcgggaacagtgggagaaggaaggcgtcatcctcggataccaggccgtggtgaatgaggaatatgaacacgacagcaaggtggcggccttcattgaagtgaaaatgacgcctgaacgcgacggtggttttgaccgcctggccatgcgcatttcacggttcgacgaagtctcctcctgctatctggcaagcggcggttttgacctgctggtgctggtggaaggaaaaagcatgcgggagattgcccggtttgtggcggaaaaactctctacgctggaaggggtgttgtccacttccacacacttccatctgaaaacctacaagaaaaacggttgtgtgtttgaagctcccgtgcagacagaacgcctggctgtcgctccgtaattctctgccgttaagaaaggaatgatcatgaattggcagaacaaaatagcggagcaggtaagctccataccccgttccggcatccgggaattttttgacctggtcacgggacgcacggatatcatctccctgggcgtaggggagccggacttcgtgacgccgtggaacatacgggaagcggccatttactccctggaaaaggggcacacctcctacacttccaactatgggttggaatccctgcgccgttccatcgtcaaatacgtggacggattcttccatgtcaactacgaccccctgcgcgaagtgctggtgacggtaggcgtaagcgaagccatagatctcgctctccgtgccattctgaatccgggggacgaggttctttatcacgaaccctgttatgtctcctatgcccccagcgtcaatatggcctacggcgtagctaccgccgtgcctacaagcaaaagggatcttttcgccctgaacccggaggtgctggaagcgtccattacaccgcggaccaaggtgctgatgctcaacttcccgacgaatccgaccggagcggtggcccctgtggaaacccttcaggaaatcgcccgcatctgcatcaggcacgacctcatcgtgctgacggatgaaatttacagtgaattgcgttatgacggcaagccgcatgtttccatagcttctctgccggggatgaaggagcgcacgctcctgctgcacggattttccaaggcattcgccatgacggggttccggctggggtatgcctgcggtccggaaccgcttatttccgccatgatgaaaattcatcagtattccatgctctgcgcccccattacttcccaggaggcggccattgaagcattggaaaacgggacatccgccatgttgaagatgcgggaaagctaccgccagcgtcgggattacctggtgaagcgccttaatgaaatcggcatggactgccacctgcccggcggcgcgttctatgtcttcccggacatttccagatttggcctgaccagcaaggagtttgccacccggctgctgatggaaaagcaggtggccgccgtaccggggaccgccttcggcgcaagcggagaaggcttcctgcgctgttgctatgcgaccgcctttgaccagatcaaggaggcctgcaaccgcatggaacatttcgtggaaactctttcctgacccggcagtgttcatgaactccgtgacggaggcactgaaaacaaaggcgtatgtggcgccgtttgcggtattcatgggctttaccctggtgtggcagtttggcgttcccgtgctggaatgggaccacccggccgcaccctggtggagaagggcgccggaacaatggctgtatcccgttcaggcaatcgtttgctttgccctggttttccggtggagaaaggccattgattgggattggcggtggaaacccgccgcctggggaatcctgttcggcgtgctgggtatcctgtgctggctggccccgaccatgatagcggaccgcctgcccggaggggcggatgcctggtttgggcatccctcctggccctggtaccggtatctgctgggaattgacgcgcgcccggatgggtttgagccgggcgtcgtctttcttgcgggttcttggagctggctgggagctctggtgctgcgctttttccgtgccgtggtcgtggtggctctggtggaggaacttttctggcgcggctatctgatgcgcctgatggtgaacccggaccatccctggaaggtgccgttcggcacccatagctggaaggcatactgggtgactaccctctgtttcatggcggtacaccagcctgtggactattgcggcgcattcgtttacggttccctggcgtatctgcttgccgtctggcggaaaaacctgtgcgctgtgatcatgatgcatgcggcggcgaatgcgttgctgggatgggccgctctggaatggggtaaatacggattatggtgaatccggcatttacagagaggattttcttaagtacataaaagccgatgactccagaggaagccatagcaattttatgggattaccatcacgtgaagcaggaactgcgtccggcggaactcatattcattcttggtagcaatgacataagggtggcggaatatgcggcggaactttatgcccggaagctggctcccctgttgctgttttccggcggaatggggcgttttacaggggaatgggccgtcccggaagcggaacttttcgcagaggaggctatgaaaaagggagtgccgggagactgcattctcattgaaaacaaatccaccaatacgggagaaaatgtccgcttttcccgcgctgtcctggaaaaagccggcatcccggaaccatccagcatcatcgcccttcaaaagccctatatggaacggcgcacgctggctacgctccaggcccagtggccggaagtacgggtggcggtcagctcccctcctttctcgttcagggaatatctgaccagggagctcccgcaggatctggttgtttccgccatggtgggggactttcaaaggatactggaatatcctaaacagggattttccacggaacagcctgtgcctccggaggcgatggcggcattccgcatgctggtggaagcggggtatggctcccagctgctcaagggtgtcccccttccttggaattcttgagaagacacgctttttgcttttactgaatgctgattgcgggcatcaatacaacccgcatagccaacccaattatataacttatcatggcagacagaaccaacacagaccccgcccgaatggaaaaaatcgtgagcctctgtaaaaggaggggattcatcttccagtcagctgaaatttacggcggtctgaacggttgctgggactatggtcccatgggggtggagctcaagcgcaatctgaaagaatactggtggcgtaaaaatgtgcaggaacgcgaggatgtggtcggcatggacggttccatcctgacgcataactccgtactggtggcttccggccatgtgggcggattctccgacccgatgtgcgattgcctgttgaccaaggagcgtctgcgtgcggaccaggtcccggcccagagcggcatggggtttttctataccggagccgccaaaaaagacggttcctggaatattgaaaagaagtactccgttctggtggaatctgaaaaacaggcggacaaggcccgtaagaccgcggctcaatattatgcccagctggccggcaaggatgcctcttacaaggatatggagctgaaaggcgagtgcatggaaaccgtaacggattccaccatgtacaatcctgctaacggttctctgctgacggaagcccgtgagttcaacctcatgttcaagacgaccattggagctacctctgatgaaaacgatcccaacgctacgggctggctgcgcccggaaacggcccagtccattttctgccagtataagaacattctggacagttcccgcgtcaaactgcctttcggaatcgcccagatcggaaaatctttccgcaatgagattaatccgcggaacttcactttccgttcccgcgaattcgaacaaatggaaatcgaatatttctgccggccggaagacgggctgcgcctggtggatgaatggctggaacaccgtctttgcttctatgacgaagtgggggttccgcgcgaacacattcatattttggacgtgccggacggcgaacgcgctttctactccaagaaaacctatgacctggagtatgaattccccttcggcatccaggaactggagggcatcgcctaccggacggattatgacctgagctgccatcagaaaggttccggccgtcctctggaatactttgacgaagagacgcgggagaaattcattccccatgtggtggagccttctgccggttgtgaccgcaccattctggccattatctgcgaagcttacgatgaagaggaactggtggacgacaaaggtaaaaaagacgtccgcacggtgttgcgcttcgtgccccgcatggctccgatcaaggcggccatcttccctctgcttaagaaaaacggggaacaggtgcgtattgcccgggaaattgaaaagacgcttcagccgtggatgtccgtcttttatgatgaaacgggagccgtcggccgccgttaccgtcgtcaggatgaagtgggtactcctttctgtataaccgtggactttgaaactctcggggaaaatgatgcttcgctcaaggggacggtgaccattcgccaccgcgactccatgaaacaggaacgtgttgcaattgaagacctgctgcattggcttattgcccgcatacgttgatgttttttcagcggctttgatgccgaaattccttcagagccgttccgttgacagcggaacggctttttattttcaaaacagcagtgaaaaaagggggctgaaaaaccgataccgggcgtgatttttccagaagagagcccgttgttccggagtcggtatgactggaggtctgtgcatttttttgatgctgctatgcacggctgggaatggatatttcttatatgttcactggaagcatatggaatgaaatttcaatgagagttattgacgtcccgccagcaaaagagggaaaatgacgggtgaggcggttcaggaaaaacgtcctgatttttgagcttttttttctcctctgctgtcaaaggtttgtacggcatggaatgatgcgatcaggtagaaagaagatattaatgatggaacattcagtaatttttccggaccatcggaaggtttgcgccctggggcagggaacctggaaaatgggaaagtcagcgttgagggaagccgatgaaatagatgctttgcgcgccggcattgagctgggcatgagcgtagtggatacggcggagatgtatggcaacgaggaaatggtgggagcggcaatccgcggtttgcgcgaccgtgttttcctggttaccaaggtgttgcccggcaacgccagcaggacaggaactaaagcggcctgcgaacggagcctgaacaggctgaagacggattacgtggatttgtttctgcttcactggggaggtccccatcccattgaagatacggttgcttcaatgattgagctgcagcaggagggaaaaataaaagcatggggcgtcagcaatatggacgttccggaaatggagcggttttacgccgtcccgggaggagtttcctgcgccgccaaccagattctttataatctggcccatcgaggtgtggagtacgatttgctgccatggtgccgggaacgccaccttcccgtgatggcctattcgcctgcggatgaagggcggctttcccgtaatccggtgctgatggagattgcgcagaagcatgaggccaccccggtgcagattgccctggcctggattttgcgctgccctggaatgattgcgatccccaaagccggttccgtcacgcatgtgcaggaaaattaccggagtttgtccatcaggctgactgcggaagatgtggatttgctggatggggcttttccgcccccggtcagaaaggtgcatctggattcctggtaaaccgtgatgccgtccggcagttggggagaagcgggacgcgcggattttcctgccgcatcagaattgtttcaagcctttcatctgtccgggatgaaagggcgccagcgggtaatttcaatacacgcacgccttgtgggtagggtattggctttttgttcatgcggccggggaatcttctgacgcgtttccggaaggggacttcccggtttttccctttgaacagaggatgtgccgttttccggttccggcttcttcagtagggaagaagattgaatgcggctgaaagaaagccgcccttccgggaatacggcattccggagaggcggctccagaggaggcgggataataaagcgctacagcggctgagcgtccgtcctgggtatccaaacgggcgtgttctggaaggtgctggcgtagtaccaggagccgcgttccgcgcgcaggatgagcggggtggattccggaagggtgatgagcgcaggtctgttcatgtccgccgcatgtctgccgggcgttttttgggtaacgaccagtaaccgatccgccggaatggattccggggtttccgggtacatgatgtagttcatgacagccgctactgtgaccagtccgctaagggtggccaggatggtcagcagggccccgtgtctgcgggtaacggtcagcagggccaggaaggtgagcatgacggctccggacaggatggagatggggccgagcgtatcatggcggatgtaagtgagccactggttttccgtggtgttggcgggcaggatggcgccctccttgcgttcgatgaattgcaggttgtattcagcttccgtgaagtacggggagagttccagagcacggcggtaattgagagcggccaggccgggtttgttcatgcggtaataggaattgccgatgccgaaacaggcgtaggcgcgttctgccttggaaaggttcatattgccgctttccttgctgaaatagtcaatggctttggcgtactctccctgttcataggcttttacacccaggttgtccgtttccgacgcgtttccggttgttcctgccagggacagggccagtacggcggccatcatgagaacgggaagcttggcgatggcttttttaatagcctggagcatgtgctggcgttccgcatgcggcagttcttccgaagattccgaaggcttgaatgccctgtcgtcccggagtttaaggatatctttcattttttcattctgcttggaaggtggaatataggattcaataaagttgccggcggcacgcaggaattccgtggagcttgcctggcgcggagtggaagcgagcctgcggaaggctctcatgcgttccctggccgtgaagctttccttccggattttccggatgtagcggatcagagccattcccagcaggatgacggcggggatgtaggccaggaaataccacccccagtgagccggggcggtaagggcgttcatgacggtggcgggcatgagcccgtaaatatccgtcatttcagctaccggaatggtgcctgccgggggaggcgtggcgggagcggcacctccggccgccgttccagtaatggctgaggccttccattccaggggaatgggggctgtggttacggttttgtactgttgcgtgctggggtcaaaaaaagtgagttcaaagggagggatggcatccgtttgggcaaccggacgcatcatttgctgaaattccacggttccctggatggagcgcgtattctggcccgggtccagcttgttgggaggatagagtttccagttggaggcgtctgtgagggccgggcaggcgatactgtggatattgcctgttcctgttaccctgattttaacagtaatgggttcattggcactgagatcccgcgcatccgtggtggaggagatgcggaaattccctacggcattggtgaaggaagagggagctcccggggggagttcccgggctgtgattttcacttccggaatggccatttccaccagtacttccgaacggatgaaggtggcgatgagagggtccgcctccggcagggcggcgcgtgccgtgacagtgccggacgccgttacctccccggcgcgcagcgggaacagggtgctctggaaggtcatgacattccagttgacgcctttgtaaagtacagaaccgcgaggctggccgcggagcagttccaccagcgtgggttcaaagcgccaggtagccaggttggaggtggtgatggcgggcgccgtgtattccagaatgtattccggggcgtaaattttcagttcgcagcggtccggctggtggacatagggtttctggttgtccacatgccacagcatgccgtacgggactgctgtgccgttcaggttcagcgtattccatttgatggcgctgtaagggtagacagtcagcgtctggggaagcgtggtataagtgcggccattgttggcctgcagggtcagggaagggatttccacggtgcccacttcgtccggcgttacttcaatggccatcaggaaggcggattggttgggagaccccggccagcggatgtagttgccctggctgacccagcgcaggctggcgccctttacccggggaagcgggtcctggcgggcgatgcttccgtctgtcaggatgatgaagagacgggtttgttctcccggcacaacggcatcggacagccaggtggtaaccacctgctgagccataagcgtgacagtcatgcagaagaaaagcgaaagaatggcgagcagttttttcatcttgttttgtgggatatgtttaaaggggtggcttcgcggatgcgggcggaacgggttagtaatccttatccggaggaatttccggagaacgctggggaacggggcagccgggttcaatgtccctgcgttccatcaggatggctcttgcttccctgcgttccttttcctccctgctttccttttgtgcggctgccggaacgggcttgttatcttccggctggggctgcggtttttccattccggacgtttctggcagcctgtctttttccggagaggagggaagccgggcgtttttcatttcattttcgtccctcttgccttccttggtttcggcgttatccttgtcttggtccttgtcttggtccttgtcttggtccttgtcttggtccttgtcttggtccttgtcttggtccttgtcttggtccttgtcttggtccttgttctggtccttgttctggtccttgttctggtccttgttctggtccttgttctggtccttgttctggtccttgttctggtccttgttctggtccttgttctggtccttgttctggtccttgttctggtccttgttctggtccttgttctggtccttgttctggtccttgttctggtccttgttctggtccttgttctggtccttgttctggtccttgttctggtccttgttctggtccttgttctggtccttgttctggtccttgttctggtccttgttctggtccttgttctggtccttgttctggtccttgttctggtccttgttctggtccttgttctggtcctgttgttttttcttctcttcttccaatttcttctttaattcttccagctgccggcggtattcgtccagggatttatcataacggagcatttcctccttgttggacgctgctccttcatgggaaccataggcagagagcgcatcgtcaaaacgtttgacggcctctttaacatgttttttcgcaacgggtatttttgccagccgggcatcaatttccttaatttggtcgtcaatggaagagagccgggcttgctgctgttccccttccggcctggagaaagtcatggtcttgcgggcctgggcggcttccaggttgccaaggttgaagtgggaatccgcctggagggctggtttgggagaaaggagcgcctgggagaaagcttccgcggcttctttggggttatccgctttttgttccaggcatcctttggcgaattccaaggcctggcgcgtttcttccgccaggtcgggaacagcgagcatttcatcaatggatttgacggcttcttccgtttttcccgtccggatcaaatccgtgacattgtccagggcgtgcgtgtccgcctgcgcttcctggcccagcaatccggcgcagaataacgccgcagcagtcagagatgtcataccgcggcgtccggaacggcggaaggaacgccagcgtgttcccgccagaagggtgaggagcaggcagatgagggccggaacggcaaagatgatgtagcggtcattcggcacgcggcgcacttcttccttgccttccgtggtatccagccggtccgcaatgtccttgacgaagcggttcagcgccgctccgtcggagagttggacatattggccttccgtttgcctggccaagtattgcaggctttccggattgagcttggagacgacgtgctggccacgacgatcccggtacaggccggagggggattgctcatccggaatagtggtgccgatagtagtaccgatacccgctgtcacgatgataagctggtgctgccgtgcggcttccgcagtcttataggtgatgttgacggtgtcttccccgtcgctgaggatgaccagggcgtttttggcgtccgcttccttgtcccgtttgaaggtttgaagggccagccgcacaacgttttccaggttggttcccccttgggagacccagccgaattgaagttgttcaatggtttcttttaatgcgttatggtcatgggtaaggggcatgagcaggacggcgtccccggagaagatgatgatgccgaagttgtcccccggcagggcgtccagcaggtcgtaggcggcggtttttgcccttcccaggcgggtcggggaagcatccttgctgagcatggaacgggagcagtcaatagcaatgaggatgttgcgcgatttggggatttcctttacctccgtgtagccgtccaccgggcgcgcaatggagaggatggcgaagatggacgccagcacggcaaagatgacggggagcacccggtgccaggtggccggagcgttaaccagttcccgccggtattccggcgaaacgagcacttcccattttctggaacggcggcgccacagccaccaggccgccgccgcgagcagggccgggagaatgagcgcgtacagaacgttgggataaaggaaagtcatgacgggtgaagatcggtattacggggcgggggccggtttgagcacttgcagggagaggcccagaagcgccagcgcggctcccgttacaaggaagtacatgaagtattcttcaatgtggcggacagtttgcactttggcctcgcttttttccagcttgccgatggaggtgaacgctttattgaaggaggccatattggtggccctgaagtgttctccgcccgtgagctgggctattttccgcagggttggttcgtcaaattcactttgcaccaccatgccgttcgccagggttccttcttccgtgcctacggcaatggtataaattttgatacccagcttggccgcgttttccgccgccaccagcggggatatctggccggagttggaggcaccatccgtcaccaggatgatgatttttgatttggtgttcttacggtcgtccagccgggtggccgccgccgcaatggcggagccgatggccgtgccgtccgcctggatcatgcgcggatggaaatcccggatgatgctgttgaccagggcgtggtccagcgtgagcggacagaaggattttgtttttccggcaaatcccacgataccgatgcggtcgtccggacggctgtcaacaaattgggtgatgacgtgtttggcggctaccagccggttgatgggcattcggttgagaaccatgtccggcgtttccatggagtaggaaaggtcaaaggcgatcatgatgtcaatgccgttgactgtccggaaggttttatcttccacgtgctgggggcgcgccagggcgatggcgatggcggcagccgccagaacgaagcaaagggcccctatttttcctgccagggattgcggagtacgcgccagggaagcgatgaagcgcacggtggggtaggtgatggagccttccgccccgcgcctgcggcggaggatgatgaggcacaagatgaagggtaaggcataaagccattcaggttgtgcaaattggaagtgttccgtcatggtatgctagcgttggttgaagcgggatgaagattttttgacgacaaggtccgtttcttccttcgtccggtgggcatccgcttctatatcattgatgagttggaccgtagcgttcgccaattcgttgaccatggaatcgttttccggggtgtccggttcatatttgagagaagccatgcggtccagcagatcgcgcgtgggggcctggagttcggaaggcagcgcggtgagcgcgtccgcccggcggttgaattcctgctgggtttcatatagtgccgggtctttggtttctcctaccaggtatttgcggaggatcagggaaaatcccacggcggcctgcctgagggagggatgcgtgttccggagcatcgagatgtcccggatagcggtttccgacgggctgagcggcgcggcggggatgcgtcccttcctgcggatgagcacgatgacggcgatagcgacggccagaaggatggaggccaaaataatccagatgccccacgcgccccaaaagcccgcttggaagtaggcatccggggattgtgtttccatcagggagggaaacgccggcggttccggaattgccgtgggggggggctgaaaggtggcgggggttggcatggctggcggagaagaggattagcgtgaaaatttacgggatcttctggcaaaaagggcccggaggggaggcatgaagttgtccgtggtctgcaagtccaggaagtcaatgcccaggcgacggaaatcctgcgtccatttctcgcggtgcagatgaacgacgttggcgtgggtttcccggacatcctgacgggaaaggttcaggaacatgcttttgccagtttccggatctttcaggatgacgcgtccggcatccggcagatgcagttccatcgggtctgcgatgcggatggggatgaagtcatgcttgaagttgagctgccccagggcggctttattgttctcaccccaaaagtcactgatcatgatgaccatggccgcttttttctgggaaaggacaagttgccgggctacatcggaaatgttctggtcggctccatcgtttttactggctacgatttcgcggacgatgcgcagggtctgcttgactcccttggccggggggatgtaatgggagtggctgttcccgtagatgaggatgccgcatttgtctccgctctgggcagcgctgtaggcgagtactgccgctacttccgccgcatagtccagtttggagacgcgggccgcggaggaggcgtagtgcatggagccgctgacgtccaccgccagaatgacggcctgttcccgttcctcccggaaacggcggacaaaaggggagttcatcctggccgttaccttccagtcaatgaaacgggggtcgtctcccggcatgtattcccggaagtcgtcaaagtccagcccctgtccgcggaagccggactggtattgcccggcgaagttttccgtggccagatgcctggcgcgcagttcaatgcggcgtacgcgcttgagaatgtctgaggctttatccatgaaatgattttccctgtttgggttcaatcaggttccggcaaggcgccccttggggcctgaaggataagggcgggcgcggaagcgtccgcctcctgccgtcacggcacggggactttcgtcaggatgtggtcgatgacgtcgtccgtggaaatgttttccgcttcagcctcataagagagcaggatgcggtggcgcaggatatcgtgggccaggtccttgatgtcctgtggagtgacgaaggaacgatggtgcatgaaggcattggcgcgggccgccagagccaggttgatggtagcgcggggagatgcccccgcgcggatgagaccgcgcaacttcacgtccaccgtttccgggaaacgggtggcgcgcaccagatccacgatgtagccgcgcacggcgtcgtcaatataaatctggtttaccaggtcgcgggaggccgccacctgttccggcgtggtgaccggggaggtttccggcggtttggcggagctggccatgaggtccagcacctggagttcttcttcgcgcgtggggtaggtgaccagcaccttgaagagaaaacggtcaagctgggcttccgggagctggtaggtgccctcctggtcaatcgggttctgcgtggcaagcaccaggaaggggtccggcaggcggtaggtggtttcacccagggttacctggcgttcctgcatggcttccagcagggcggattgcactttggccggggcgcggttgatttcatccgccaaaatgagattggcgaagatcgggccttttttggctgtgaactgcctttcttctggattatagatcattgtgcccagcaaatccgccggaagaagatccggcgtaaactggatgcgggcaaactgtgcatgcagcgtgcccgccatggcttttacggagagcgtcttggcaaggccgggcacgccttccagcaggacgtggcccttgcagaggagactgaggattaatctgtccacgagcgcctgctggccgatgaccaccttgccgacttccgttctgagagcagaaatccacgatgagttcgcggcgataatttcgttgaattctcgggtgtccatgattctgatagcgggtgagacagtatgccgggcacttacgttgaaaaaatcctattatttcccaagggcaaatccggttttcaacaggaggtcttcccggaaatggggagccatcatctgaaagcccacgggaagttccatgccgctttccctgacggttccgcagggaatggacatggcggggaggccggccaggttggcggggatcgtgtagatgtccgccagataggtctggaggtgatccagcgcggaatctccgattttgggagcgggagcgggcgaggtggggcctacgatgatatccgccctggaaaaggcttccgcgaaatctctggcgaccagggagcggactttttgagcgcgggagtagtaagcgtcatagtaaccggagctgagcacataggtgcccaggatgatgcggcgcttgacttccggcccgaatccctcttcacgggtgcgtgagaagagttccaccagtccggcggcgtcttccgccctctttccgtagcgcacgccgtcaaaccgggagaggttggaagacgcttccgcgcaggcgatgatatagtaggcggcgacgacggcatctgcgtggggcaggttgacttccaccagctccgcgcccaggctttccagctgtttgacggtgttttgcacagcctcggaaatgcccggatggttgccggaggtaaagtattccgaagggatgcccactttcagccctttgacgtcacggcccagcgcagcttcaaagtccggcacggggcagtttgcggatgtggagtctttacggtcgtgtccggagatggcctggagcaggatggcggcgtcttccactgtccgggtcatggggccgatctggtccagggaagaggcaaaggctaccagtccgtagcgggaaacgcgcccgtaggtaggcttgaggcccacgataccgcagtgcccggccggttgccggatggagccgcccgtgtcggaaccgagtgcggcaacggcggtagcggatgcgacggcggcggcagagccgctggaggagccgccgggaatgcggtccggggcttccgggttgcgcgtgatgccgtaagcggagttttctccgctggcacccatggcgaattcatccatgttcgtgcggcccagcgggatgccgcccgcctccttcagcaggcggatggaggtggcgtcataaggagcgacataaggggaaagaaggcgggaggcgcagcgcgtcggctggcccaggacattgatgttgtccttcacggcgatggggatgccggccaaggggccggaaatgtccgctccggccgcggcgtggagggctgcttcgcggtcaaaggagatgtaggcgttggttgtccggtccgcctcaatggcgtccgccatcaggttgaccagttcggcaggggagagttccttgcggcgcaggcggtcacgccactgggccagggtgccttgaatttttgacatgagaaggaaagggtaaagacggttgaaaggtgaagggaaaaggaagcgcgaggatcaggcggattccaccaccttgggtgtgcggaattgcccctgggactgctgaggggcattggaaagggcttcttcctgggtgaagccggtttcaggaatgtcttcgcgcatcacatccattgccgggagaggatggttcatgggggcgatgcccgtgacatcgtaggattccagcttggtgatataggccaggactttgtccaaatccttggagaagagcgctgtttcttcctccgtcaggtcaatgcgtgccagcttggcaatgtaggctacgtctatttggggcgtgctcatggtgtaatgtagaaaagatgcggaaaagaaggggggctgcctactgttgttccagcaggcggacgatccagcagaaggaagcggcgatggcgcagatcagcaggcccagcagcatgaagttttctcgcagttcccgcctcatgttggtggcgcgtccgtcacgggccactacggcacgcagtgcccggttctggttgccctcccgaacgcggtcgggaggcggcatggtattgcggtccaggcgcatgcgggtctgctgggacgggcgtttgagagaggcttccaattcctggatacggctctcaatttcccgtgaggcacgatccagttctgccagttcggaggaacggcgtttggtttttcttttaatcatgatgcggaaggggtgaaaatccagatgaaaaagaggatgatgagggcaatcaggagcaggggaagatggaaggaaaggccctggaggaactgggtcatgaattctcgggagctgatgcgcactttgctggagcggcgcaccccggtgagcactttggtatgctgcatgcgcgcgcactgctggacggcatccgcgaattcttcctcgcagcggtcaatgacctgctggccctggctgatgaggttgtccgtattttcaataggccattcatccgggcgcacggtgctgagcattttcaggctgcgcgtcagcgccatgtggatttgttccagttcattgctttcctggcggaggctttccacttcccggccgatgaggtctgcagcgttgaccatgcggtcgcccagctcattttgctggtccataaacctggctttgcgcatatggcattcttccaggcggcggcgggagttttccacttcctccttttctttccgcaattgttccagcctcagctgggcctgttccatatcggcgtccacctggtcgtctgcctgggaattgtaaccggggtcggcgtccatgcggcggtattgagggtgacttggtctcatatgcggaaaaaataatgcgggccggcgtaagggattacagcgtttccagtcctttttgccggagcggggaatccctgcgcgtgctattatttaactttcacaaaataaatcaagccaagaagaagacagggaaagattttccggatacgttcccggcagggaatgccgccctgttttttctcccggagccgtgcgttccggatatccgtggggcgacaggacgctccgctttcccgcaaaggagggggaggtgcgctttttttatggtcaagggcatggatttgctggtatgtaggaagcatgcagtctgacacggtagaatgtaagccgaccatgtggtttaccggcagggcggttatcatggctctcatgtttctggggttcggagtgtatttttattatgatgcatccaccggataccctcaaaaaaacctggagtttttcatgcacaaggcgttcgtggacgctggagccgtgtttgaccgtgaggtgagcgggaaaggggcgtccgcgggggactgggagcgcattgttctggcgcgcaccgtggattttccggagggctacgaaattccttccgacgtgaatcggaacgcggtgccgtggcctgacattttggcggattacagtctgatgtccacccccggcaagggctggagcgctgcgtggcaatcttattccggggaaaagcactatcccatcaagccggtggaccacccgtatgacgcctccaaaatttttgaacagtgggtggccgggtgcatttgcctggcgcttgccatggtggctctgtttttcctggtgagaacgcgcggcaggaaaatgtccctgaacgggaaagaggtgacggccgccggcgtggttttccgcgtggatgacattgcccgtctggatttgcgcagatggaaactgaagggactggccatagcgacgctgaaaccggaatgcggaggagcccgaatcaggctggacggcctgacttacggcggcttccggaaggaggattctccccataacgcggaagatttcatgaaggctcttctgtctctctacagaggagaaatagtggattatgaagaaattcctgatgccggcgggccgcctgcccggcaggaggacgaggaacgtgccgtatgagcgaatcccttccaccggaaaagggcgccaatgaccgtgcgttcggcgtcgcctgctggacgctgggtgggctggcgtttgttctgttgttgatggtgggcgtttctttcagcctgtctgtccgtaccgtggtggtggaaaaagtggtggagaagcctgttcccgttccggcacgggagaagcaggagcgtccggccggagtcgttgagaatggggcggctgaggagacagtgcatatggcggatgttccggcacccccttctgaaaagccccgttccgtggaagaaatgctccgggaagccgatttgtcagatccggctgccgattctgtaccggtggccgcggccgttgcgggaggggaggactccgctagcggggcatcccttcctgctgaggatccggacgaggtcatgcctcccatgacggaggaagtggcagagcttgtcaaggcggctcgttacgcccagattgaaggtgacctcaaagtagcggtcgtgaagctggagcaggccatgaggctggagccggataatccggtggtgctttattattatggacttacctatgaatggctgaggaatgcggataagtcacgggagttttttctgaaagtatatacccagcgggagaaggcggggaaatattttgcgcgtgcggcgcggcacctccaggccggcttttccagcccggcggatttgcggggggatatgtccttcggcactattctggaataccgggatccggaatgccccgccggggagcgcgtcaagctgatggtgcctattctgatgaaggatggcctgaatgtcaggccggaggatttgcgcgtcattgtccagttttttgacaaagtcaatgggaagaaagtggaaaagacgcacgcgcccgagccttcttcccggtgcgttacggaacccgcggattgggcggacggtgaggaaatcatggaaataacctactacatgcctcccctgacggaagaagagacgattgcttatggaagcctgaaatattacggatataccgctaaattgtattacaagggagaaccgatggattgccatgcttcccctcccgtgctatttttactggaacagatgaaccagagttccccttccggactgcccgagatttatgacggcggtttgcttccccctgtagaggcggctccggtttctgagtcttatgaatcccttttgcctccctgatgcctgatttgtccaatgtttgatcttccccacaactttggcgattacacgctggtggcattcattggccgcacgcgcggaggaattctttatcaggccatccagcagggcatggaccgttccgtgtttctggagttgctgaatccggacaatccggagggggtgggcgtggaggattttctgatgaaggcccgcacgcgcgccgccattaatgctccggtgctgggcaccgtctatgaagcgtcccaggcccagggatactggttcgtcaccagcgaacagctgggaggctcatccctccagtccatgctggaccgcgggcagaccctgtccatgaaggatttgctgaaagtgattgaaacggtcggcaacgtgtgcggcaggtatgagtgtctgcggaccgctttcaatatcatggagccgcgtcacattttcctggatggcaagtctgtcgtgcggctgatgaatacggccgtgcccggtgactttcacgaagaaacatcccgcgaccagatgaagcgcctgggcatcgacctgcctcctctggtgactccggatgtgcccggaaccacgcggatgcgcaccctgctggaatggatgagggaagggcagaacggaaagccgatgcaatgggaccaggttatggagctggttgctgcggtccgcgaacagctggggctttcccctcgggttaccacccaccgctataccgtccccgtggaatcccgcggaaaagccggaaaaaggctgctttgggccggaacgggcctgctgggcgcggggatagccgcggctgccgttcttcttttattcccccgggagaaggaaaccgtatcccgtccccatgttccggctcctaaacattatccggatttttccgccagcgatcatacggaagtccgcgtaactcttcccggaggaggggaactgattgtgggagcccatgaaattaccctggaatcctaccgcctgtttttggaccagtgggcacgcctcactccggagctgagggaggaatattcccacccggaccagccggacaagaggactgcttcccatattccccaggactgggaggctatgtggaaggcggcttccacgccgggaggcaaatggaaaggcaggaaaataacaccccgctctcccgtcgtcaacgtcactttctgggatgcctgggcgtatgcgagctggaagcccgtggcccccggagaaccgcgctaccgcctgcccgagcgcggggagtggatggctctggggaatatgctggaaacgggtgagaagggggacaggacgctggtgattgacagatacagcaatgatcatgatttaaagaccggcgtgtgcggcatggcttccggcgtgatggaatggacttcttccatggaaaaggatcctgcgcgcgtgaaggagcctccgggaccggtggcctgcggcggagactggaggcagcccggcatctccaaccgggtggaatacctgcgctcccgcggcgaaagacgggacaacctgggattcagaatcgtgcggaatgcccgctgacccgtttaacgacaatacttaacataccaataccatgaaacatatccttgcaatgctgctggcccttctgggggcgtccggggccctggcccagatttacgtaaaagtagttccggaaaagaagactttcctcagcggggaagccatgtacatgaggctgaccattaccaacaattccggcgtgccggtggaattgaagagccgggaatattcctcctggctggatatccatgtggagcattccactgcgggggcggaactcccccagtccaagtttgccctgtttccgcctctcaaggttcctgccggcatgagcgtttcccgcaagattgacctgcgtcatttctatgacttgtcccgtgagggcaactaccatgtgcaggccgttgtaaaaatgcccaaccagaaggacatgtttgcttcccagaaatccctgtttgccgtccggacgggaacacccatgtggtcccagaccgtggccattccgtccagtgccaagcggtgcactttttccatttgcactattgccgtgcggggaatccagaaattgtatgtgcagacgaaggatccggatacgggagtggcctacaatgctgtgtgcatcggtgactggctggggaccacgcgtccgcagtgcatggtggacggcaaggcgaatgtccatgttttcttccccactacccccatgctgagcgcgtattcccgcatcaactaccggggaaccatggaaaagctgcagtactataaaaaggtggtgggagccccctccatggtctttcttccggacggaagcgtacgtgtgacgggagccgtccattatgatcctaccgtgaaacccaagacggtgccggatgccgctgatgttcccggcatgtaaatccgtcctgtttcgccggatgtgccacgcaggggaaaaggaaaggcaaacgtacagcttcttccgtaccgggaaaataaaatgttccggtattttcctgagctatttttccggctggggcgcgtttttcaggatgttttgcacgcttttctgcacaacgctgatgggcagggcataattttccgcccggttcactctggcgatgttcatgccgatgagttcccccttgagattgaacagcgggccacccatcagcgtgtaccgggaaggggtgtcatgctggaggaccatagggaaatcatccctgcgtttgctgaacccgccgctgatcaggtcattggaatcctcaggagcgtttcctcccagggcctggcgtctggaacccagcgtgatggtgtaggataaccttttatccttgcgtttgacttccagtgtcactctttctccaacttttttcctggacagaatgggggaaacggcgtccagagcagtaacgggcgtgccgtccaccgccagaatctcatctccggccttggctccggcttgggcggcggggccgtccttggtaacttcctgaatggtacagggggtgccgaaaacgacgcccaggtaggcggtgtctccgttcgggatggggcgctgctccgcactaagggttcccagctggggccgtctggacgtacgggttgtggagccgttgctgactaccagggttcccatggcggcatcattgctgacggggccgggagcgtgcagcccggcggcttccactttcactactgcgatgtctgtggacgggtccgagccaatttccctgaactgcccatatttggaagaacctacccggatggtcagatccctgtaggaatggagttccgaggctttggtggcgatgtagccgtccgggctcagcacaatgccgtaaatcacaacatcgtgaccggaaaagaaaactgcgctcaagtcctgaagacgttcgcggatgggctcgatagttttcagaacggctttcccgttgattctctgttcaaaatccaggcttccgttatttccttccgccagagcggggtggaacagggcgaaaaccaggggaaacaggcagatgcagaaaggaaatttcatgatggctgagtggagaatggctggctgtcctgttccggtgacggcgtcagggaggtctttccttccgctgtctcctccgtcagagcgttgaaatccttcatgggcacgtgaagattgtcttccagaccggaaccgactctgctgtgaatgccaatcagctttccatccaggttgaaaagagggccgccggaatccccgcgaatcagcttgcagtccgtctgaatgacgccgttcttgagggaaaccaccctccccaggcgcaccatcgggccgcgtttccggtccagccccccgccgtgccccagcgcgaacacccagtcccccacacgaggcattttttccgctttttccacgcagggcagttttttgttcaattgggatgtgattttggctatgcctgcgtccgaattgctgttttgcgccgtggtttttcccggaaggcgcgttccatccggcaggatgattttgagcgtggttcctttcttgtccacaacgtgggccgctgaaaagaccaggcctttttccgaaaccaggatgccggagccgctaccgttgtttaattcaatgcagaccagggcgggaagcacccggggaagcatttgctgaagctggcgttcaatccgctgcaaatcctctacggattgcggggtggaagccagaagaccggctccatcagcggactgagccggcgctggcggggccagcagcgccgtgccgcagagaatggcggaaaaacagggattccggagagccggggtcatgattgccggtgattattgcccagagacggaagtttccgtcttctgctgctggtcctcctgtccgccgcccaccagggaatcatggtaatacacgccgataaacaagcctgccagcgtaataagggtgatgaggagctctttcatgccgtcacagcatagaatgtgtattcgcgtctgacgagagaatttcattgataagccgcattttgatgcagttcggcagagcggggatgaatgcggatgagaaaatagccaaaataaaggttgctttttcccgtgataggcgtataaatccctcagtggccgtttccggttcgctggctcatttcaagcggatgtagctcaggggtagagcgcaaccttgccaaggttgatgtcgtgggttcgaatcccatcatccgctccattttttaagaattccggccggtttgatgcgggaataatgagtttgcctgaacagtgatatttccgtttaatcgtttgaaggtgcggaaggaggatatggcggttcgtttatttttgcggaggtgaaacaagagccagccggatatcttgtttgcagcggggccttgtgcgctgccagcttttgttgatctcctccggaaggagaggaattattgcggaagcccgctttcctggatgacgggagtttcccctggaaggacttttctttttaaaaacagcgctgtcaaatatttacggaccggttcatcatagagtttcaggcagagccaggccagcagaatgcttccaatgacgacggccagggctccgggaagtgagtccaggaaggaaagcttttcgtttttcacccacgcatagtacaagtagatgaacgggtaatgcaccatgtacagggggtaggagatgttgcccaggaaacggcatattttatccgtatagggatttgtaattttgccggaagcgccaaagaggaggatgagcgggaaaaataccgcgaagcacgctgtttcatagaggctgttcatccagaaagcattttgtcctcccagccggggaacggccagcagaatggcaagagacagactgcataaccagaaagaatttttgacgttgaacggtttgaacagccggaacaggagcagcccggctgagaaggagtacaacaggcgcagggagccgcccgtccattccgtgccggtcatggagaatccggagcatatgtccccgttggggccccagaagctgaaggaggcaaggccgcatccggccgcgacaaccagtattgccagggaacgtgtggagagtttccggatgaagagggcataaagaaggttaccgatgtattcaaagaacagggaccagctcgggccgttgagcgggtacatttctcccagaccccggatttccatgccgggaggagacggaatgagcagaatgttgacgaaggtggcggcgaacagagagatgacagccacctgcgatacgtcccatacggggcagccctggaaatagaagatgagcgcgccgatgagcgcccctatcgccaccatgggctgcaggcgtataaggcggcgtttgatgaattccctggtcgtcatcgttttccagcggttatcataggcatagccgatgacaaagccggaaagcatgaagaaaaaatcgacggccaggtagccgtggttgatgatttggtccacatggctggtggcgtaggcttcaaagatgtggaaccatacgacgacaatggcggctacgccgcgcaacccgtcaagaatgtggtagtggtgtttttcactgcctgggggaatgggagaatgctgcgttttcaacatgagagaagctgttgttcgatactgtttttgttttaatgtgaaaaaccggctgctcattttccgcctttccagtagatgcaggttctccggaggcgcagttgttgagctgcctaagcaagtacccttcttcccggcagattctttcaacaggtgtttcctgttttatccgccggcagggcgatgagcggaacgaacggcggttttccgggggggggaagaatcgcttatggctcggaagatgcaggcaaccgggaaacccgtcaggatggaacgaatgctcagcctttgcggtagtttacaagggtttccatatatattccggagatactgccgccgtccatgggggttatgtccttgaatgcggggttgatgggctgcagcacgtattccgtttttcctgtttccgcatttgtcctgcgaatcagttttttcagcgtaacgccgcgtccgtcgttgtattccacgatggttcccggtttggggatagacggggcggtatggcgccgcataatcaccagggagccgtccgggatgaggggttccatggatttcccttctacgcgaaccacgtattcgtttttacccaggggcctttccatgtaaatggtagacgggacagtgtcgctttccgcaagagagcctgcggcgatgttgccgattatttgcgtactgtattcacgcctggcgtgtccagcatgggacggaaattgtctgaccaggggaaccaggggggagtgtgttggccgcagctggcgttcctccgccgcttcgtccgccaaatccgtcagccactggcggagggggacgcctttttcagaggcggcccgttcatatttcctcatgcgctcttccgtgatttccagcacgaggcgattggtctggacaggttcgtcttccggttgaaccgttttgtattgagacatcagggattggattttcaacatggcgctggcggggaaggggccggagggggagagccagttattcaccgtacctttttccgtaccgcattccatggcaagccagtcacggtttttcccaatggccttcaaccagtgtttcacatccccttttgtcggtgtcatggcttgatgatacacgattttcgtgaattgtcgatagaaagaaataaattgaattcgttaaaatatattgacgcattaacgaaaatcgttaaaaaggcgctatgaagtacatgcctttagacctttccgtaatgcagccggagccgtttccgcatcccgtgatgatgaggtccgacctgtatcccagaagacagccctcccgggaagaaaagtggggcatttgccccggttccgtctgcggcgcgctgcgggcgctggttcgtcgatgctgggaagaggcggagcggcggaagctggcaatgaacattctttccgtcgccggagcctgcgttttcggactgatggctgtcggcgtgttctggctggctgttgagatggataattccgctttgcaggcttccaagtcttcctgttccataaaaccgtaagccggcccttgtccaaggggggcggaacgcttttttcctgcggagcttgctttcggaaatgaacgatcgcgtttgatgcctcccggtttgttttttccggttgaaacgcctgcggacgcatgaaaggttccggcaggaatgggcgccggatttccagaggggcttttttatccgcagagcaatttgaacgggagagacggagagggctggagcttggatgactgcattatttgccggctgcatcacccgggttccggaaatgccgtccgccaatgccgttcctgtgcgggaatagcggttggtcatgcaggcgggcagtatggcgcccgtttgcgaagaggatgaagctgtggttccggatttctgtccggagggaaccgcatgagatggagcagggatgcttttcctccacgtggccgtttcccgtttatctggcgcggtttgatttcattctggcgtggccgccgggaccggctgttgaaggagtttcctgaggcgcaagcgggcacaggcctgtatggaaatcccctgtggtgtctgtcgtgccgggatgcgaggcggggatgatgcgacccgggtccggggcgcccattattccgggcgttatggcgctggtcgggagactggcggcggaagatgccgccaggaacggcggccttccgcttctggattcattccgggtaaaagatgcgccttttgcggagaaagtgaaaaatgaagaggctttttccgattttgcatgttgagaaataattttatgacagttgatatgtattcattataaatgaattaaaaagaatgaagcagaaagtgctaaaaatcttttgcattatagttactataaggaatagcctgaatgaagaaagaagaaggcatggtacgcggccggcgtcctttcccttctttttccggaatccggccatcgccgtttaaaaggcacaccatgaaaaacaacagactttttatcaaatcatcgccatgaccaagagaatgattaaaaatgcttcctacgaaggggaacgtcccctgttcgcttcccgccatcttaggctggaagacgtcattatttatccgggggaatccgccctgaaggaatgttccgacattgaagctgtgcggtgcgagttccgggggaagtaccctttctggcacaatgacgggctgctggtggaacattgcctgttcagggaaggcgcccgggccgccatctggtattcccggaatctgcacatgaaggatacccgcgtggaagcgcccaagatgttccgtgatatggacgggatggttctggagaacgtcgttctgacggatgctctggaatgctgctggcactgccgtaatgcgaagcttcgcggcgtgcaggcggagcatggggattatctgttcatgcacggggagaatatagatgttgacggcttccgcctgaacggaaattactctttccaatattgcaggaatgtggtgatacggaatgcggaaatccattccaaggacgctttctggaatacggaggacgtgacggtgtacgattccgtggtggatggggagtatctgggctggcattccaggaaccttcgtctggtgaattgccgcatttccggcacgcaggcgttgtgctacgcggaaaacctggttttggagaattgcacgctcggagaggatgcggatctctgctttgagtattcctccgtgcatgcggaaatcaaggggcgtgtgcacagcgtcaaaaatccgcgcagcggccgcattgttgcggaagagtacggggatattattctggacgagcattgcaaggctccagccaattgctccattgaaacggaaaaaaacaatccggagaagccgcatgaagtacgattttgacactgttgttccgcgccgcggcacgaattcctacaagtgggattccatgccccgggaggatattctgcccatgtgggtggcagacatggatttccgtacggctccggcggtgacggaagccattcggaaaagggccgaacacggcattttcgggtatacgcgggttccggattcctattatgaggcggtcgtgaactggtttgaacgccgccacggctggaagattaatccggaatggatgatttataccacgggggtggttcccgcgctgtctgccgtcatacgggccctgacggttcccggagacaaggtgctggtgcagacgcctgtgtataattgctttttttcctccatccgcaataacggatgcgttgcggaaacctgccctctgaaatatgagaacggcagatatacgctggatgcggaggatctggaacggaaagcgtccgatcccgccgtcaagctgatgctcctgtgcaatccccataatcccgccggacgcgtctggacaagggaagaattggaggagatggccgccatttgccggagaaacggcgttttcgtagtggctgacgagattcattgcgaactgacgtatccgggccatccctatacgccgttcgcttccctctccgaggacgccctgcgccattccgtcacctgtatttcccccagcaaggcgtttaatctggcgggcattcagatagccaatatcgtcgcggcggatgaagaagtccggaagaagattgacaaggccatcaacatcaatgaggtgtgtgacgtcaattcctttgccgtggatgccctggaagcggcttataacggcggggaggaatggctggaggaactgaagctctacctttacgggaattacgagattgtccgcgatatgctggccgaacgtctgccgcagctccgtgtggtgccgctggaggggacctacctggtctgggtagattgttccgcgctgggacttccctccgcagagatcgtccgtctgctggaagaggaggggcgggtgctcgtcaacggcggggaaatgtatggggaaacggaggggcgcttcattcgcctgaacatcgcctgtccccggaagctgctgcttgaggggctggaaagaatcagccatacgctctgcggccgcatttccggaacacgaacgtgcccggcgtcccctgcaggttcttaacaggtagaacggttttaataacaagtaatcaagttggcatggaaaataagatgacgagaagaacatggctccagtcttccaccgcagccctggcgggcctggctttgccggagtatgccctgggcgcggttgcggagaagggtggagcttccagggtctggatgacgaaggaaatttctccggaggctctcgtgaggatttacgaggctctggggcgtccggccgcgggaaaggtagctgtcaagatcagcaccggggaaccgggcggccataattttctgagtccggccttaatcaaaggcctggtgcgccgggtgaacggcaccatcgtggaatgcaatacggcttacggaggcaaacgctcacgaacggaggaccatttgcaggctgcgaaggatcacggtttttccgatattgcgcgggtggacatcatggacgcggaaggagagttcactatcccggtgagggacaggaagcacctggaatacgatatcgtggggaatcatttgaagaattatgatttcatggtcaatctggcccatttcaaagggcatgccatgggcggctttggcggcgtgatcaagaaccagtccatcggtgttgcctcggcagccgggaaggcgtacatccattccgccggaaagacgcgggatgtttcctccgtgtggaacaatctggccagtcaggatgatttcctggagtccatggcggcttccgcgcaggcggtggcggattacttcggggacagaattttgtacatcaatgtgatgaataatctgtccattgactgtgattgcgattcccacccccatgcgccggaaatgaaggacatcggtattctggcctcccttgatccggttgctcttgaccaggcctgcctggatctcgtttacgccgtcaggccgtccgaagggaatgacaacaggcccctggtggagcgtattgaaagccgccatgggcggcatacggtagagtatgccgagaagataggtcttggcagcaggaagtatgaactgaaagagctgaaaccgctgcaggccgtttaatcggcaatttcctttttagcatcaaaaaacaatagaaaaaactgttatggaaaaaatcattttgaacaatggcgttacgatgcctgtcctggggtttggcgtttttcagattcccgacgctaaggagtgcgaacgctgcgtgctggatgcgattgaggtcggctaccgttctattgataccgcgcagatttacggcaatgaggaagccgtaggccgcgcggcggagaaaagcggggttcctcgggaagagttgttcctcaccacgaaggtgtggatttccaacggcgggtatgatagggcgaaggcgtccattgacgaatccctgcgcaagctgcgcacggattatctggatctgctgctcatccaccagcctttcaacgattattacggcacttaccgggccatggaagaagcgaaccgggccgggaaggtccgcgccatcggcgtgagcaatttttatccggaccgctttgtggatctggcggagttctgcgagatcaggcccgccgtcaaccaggtgaaaacgcatgtgttcaatcagcaggaaaaagcccgggaagtgatggaaaagtacggtaccagaatagaatcctggggaccttttgcggaaggccgcaatggatttttcacgaatccggtattgaagagcatcggcgagaagtacggcaagaccccggcgcaaacagccctgaggttcctgattcagcgtggaattatcgccattcctaagacgacccgccgggaaaggatggtggagaatttcaacgtctttgattttactctttcccaggaggatatggaggctatcgccaggcttgaccggggagagagccttttcctgtgccaccaggatccggaatcggttttgtacctgatcaattacgggaagtaatcattcacattagatattggacatatgaccgttatttcattgacaaggatttgtctggctttctccgcaagcctttgctgcgcagggagcttatccgctgaacatcatcataccgacactaacaaaatcatgaccgaaaaactgaatgtaacgcaggaatgggataaagtgtttcctaaaagcgacaaggtaacccaccgcaaggtaagtttccgcaaccgctatggcattacgctggctgcggatttgtatatgccacggaatgtcaacgggaaattgccggctattgctgtttccggtcctttcggcgccgtgaaggaacaatctgcgggcctttatgcccagacgatggccgaacgcggttttctgacgattgcgtttgatccctcgtatacgggagaaagcggcggatttccccgctatgtcgcttccccggatatcaatacggaggatttctgcgccgccgtcgattacctctctacccgtgatgacgtggattcggaacgtatcggaatcattggcatttgcggctggggcggcatggcggtcaatgcggcggctatcgacacccgcatcaaggctgcggtaacgtccacgatgtacgatatgagccgcgtgaacgcgaacggctatttcgacgcgatggacgccaacgcccgttatgagcttcgcaaacaactgaatgcccggcgcacggatgatgcgaagaacggttcttatgctctcgcggggagcgtgcctgattttctgcccgcggatgcgcccggatttatgaaagattattacgattattataagacgccccgcggctatcacaagcgttcgctcaattcaaatggcggatggaacgttacctcggcgctttctttcatcaatatgccccttctggcgtacagcggtgaaatccgcagcgccgtgctcatgattcacggagaaaaagcccattcacgttatttcagcgaggacgccttcaagaagttgaagggggataacaaggagctgatgatcattcccggcgcgagccatgtggatctttatgacaatcaagccggcgttattcctttcgaaaaaatcgaacagttctttttgaagtatctgaaataaggcgattctgcggctgaatttggagaagaaagatggaacgtaatgaaacgcaaggattttctcaaaataacgtccggttttgccttatccctggtttcccggggatgggccggggagggttcttctttgcttcttgatggtccggggtcttcttccggggcaccgaagaagggttttcctggggaatcccggcgccttggaggtctggaagtgtcccccatcgggctgggatgcctgccgatggtgggttattacggcggcaagtatgataaacaggagatgattgccctgatacgccgggcttttgacaaaggagttactttttttgatacggcggaagtgtatgggccttataccagtgaggaatgggtgggtgaagctctcgcccctgtccgcgaccaggtcaggataggtaccaaattcggttttggagtgaaggaaggccgcccttcttccctgaacagcaggcccgaccatatccggcgtgcagtggaaggttccttgagacgtttgcgtaccgaccatattgacctgctttaccagcaccgggtggatccggacgttcccatggaagaagtggcaggtacggtgaaggaactgatgcgggaaggaaaagtgctgcatttcggcctgtccgaagccggcgcccgttccatcaggaaggcccatgccgtgtgtccggtgagcgccgttcagagcgaatacgctatctggtggcgggaaccggagacgaagatttttcccacgttggaagaattgggcatcggttttgttccgtattgtccgctgggacgcgcttttctggcaggagccgtttgggaggacagccgttttcaaaagccggaccgccgcgccactttgccccggtttacgccggaagccctcagattcaacatgccgctgactgttcttgtccgggaatgggcggaacgcaggggcatgactccggcccagttcgccctgtcctggatgctttcccggaaaccgtggattgcgcctgttcccggaacaaccaatccagcccatctggatgattttctgggaggggcttccgtccgcttgtccgaaccggaactcaaggaattcgaccttgcctgttccagaattcccctgatggggcaccgggcggatccgtttacggagagccagattgacaagtagttttgccggcgcgtttccttccgctccggaaaaatgccgcgggactgtttgcggcggaaggatgttaagctatttttaagaaagagacatatgattctgattttcggagcattgctggcggtttacgttttttgccgcgctattttgccgctgaagctgaaatggggctggaagcttctgcttgccgccctgctggcggtggcggcattcaaattccacttgctgcatttgtttggaggccccatgtttttctccccggttttgccggaaaacgttctgctggcggccgcgtggctgttctccgttcttttcctgttctttttcctgctgctggcggcggatgtggtgcgggctctgtatctgctggttttgttctgcttgcggaggaacaggacggaaaggttccgcatcattggcaaccgggtgaatgttgctttgctggttttttccgccgtgctggcaactgtgggcatgattggaggcaccagagtgccccaggtgaaggaggaaacggttgccgtgaaccgcctgccggaggaggcggacggattgacggtcgccgtgctggcggatctgcatgtggacggcattacaagggaggagcgcattcggaagattgtggagcgcacgaacgccctgaatccggacatcgtcgtgattgccggagatttcgtggacgggacggtgcccgtgcatggcggcgatttgaggccgcttgcggatttgaaggccagatacggggtgttcggcgtgccgggcaatcatgagtattactccggttatgaggagtggatggagttcctgcccactctgggcattcgtatgcttcttaatgaacacgcgccggcgggaggggaggccgtggtattggccggtgtgacggatcctgtggccggcatcatggggaaggaggagccggatataagcaaggcgttgaaggatgccccggaaaagggagtgcgcatccttgtttcccaccagccgcggctggcccgggaagcggctgcgcacggcgtggatcttcaagtgtccggccatacgcacggaggcatgattgccggcgtggaccggctggtggcgcgttttaacgagggattcgtctccgggctgtacacggttggtcatatgaagctgtacgtttccaatggggcggggatttggaacggctttcccatccgcatcggcgttccatcggaaattgttctgattcggcttcggaaagaataacatatattgataaagcagtttaggaagtgatgcgggcaggattgccggaattgttgaaaaaatattgacttatagttactctaatgtttagacagaaataaggaacaaggtcaggcaagggaaatgccggatgaaaccgttttttctggacgccttttgcctctccttttaaccggataaaaatacatgaaaacaatatcaatgatatgcacgctggccgcggccctgatgacaggagccggatgtttgggacaggaacaacccaaggtttccgcggaaccttccagggtcctcattgcctattattcatggggaggcaatacgaagtacgccgctgcgcaaattcagagggcgacgggaggaacgctgtttgaaatcaagccggtcaagccttatccctccgaataccgggaatgcaccgtgcaggccaggaaggagattcaggaaggggttcggccggaactggccgccaaagtagaggatatgggcaagtatgatgtgattttcatcggcagccccaactggtggagcaccattgcgcctccggtcgcgtctttcctggcaagttacgacctttccggcaagacggtgattccatttgtgacgcatgggggcggcggcatggcgcgctgtgcggacgaggttcggaagctgtgtcccaagtccaccgttctcaagggaggcgcttttgccggggaaggaatccggacgacgagggccgcgcttgtcaagtgggtcaatgagacgatttccatcaataaataatgattttatgaaacgaaccatcgcgggaatggctttttcccttgcctgtctgatgaacctttcagaagcccaaaccataaatcacgataaagtggaaatggagaatggcaaaaatacgggcatgtgcgacaagttaccgatgaagcctgatggtatcgtccgtctctcaaaaatagaagtgcattctgaatatttggaggaatatgtgaaatgcgccatcgaagtgggggaaatctccctgcgcacggaaccgggcgtgttgaccatgtacgctgttgctgaaaaggacaatgcttgcagaattacgattcttgaaacttacgccagccaaaaggcatataagtcgcacatcgcatcggcccattttcagaaatacaagcaggaaacgttacacatggttaaggcattggttttatccgaccagacgccactgaatcctctaaacagtattactaatattattaaataatacaataatgaataagattattttatttctttcaattagttttttcataacaaatgctatggcgcaggaaaagatagtacagacggcgggacgcactcagttaggagaatttgctcccaaatttgcggaacttaacgatgatgtccttttcggtgaagtatggagccggactgacaagctcggtctgcgtgatcgcagtttggtaaccatcacctccctcattagtcagggcattaccgacaattcgctcgttttccatcttcagtcggcaaagaagaatggagttacccgtaccgagattgcagaaatcatcacccacatcggtttttatgccggttggccgaaagcatgggcggcatttaatctggccaaagacgtatgggcggaagatgcggctggcgaagacgccaaagccgctttccaacgcgaaatgattttccctttaggcgagccgaatacggcatatgccaagtatttcacaggcaacagctatcttgcacccgtttcacgcgaacaagtgaatatctccaatgtaacttttgaaccccgttgccgcaataactggcatattcacaaagcgacgaaaggcggcgggcagatgcttatcggtgtggccggacgcggctggtatcaggaagaaggaaagcctgctgtggaaattcttcctggaacagtcatccatattcccgccaacgtgaagcactggcacggggctgcctccgacagatggttctcccacttggctattgaggttcccggtgagaatgcatccaatgaatggctcgagccggtgacggatgaggagtatgccaaggccgtgaaataatgtggatacttccatgtgaaacaattacagcgcaagctgtcgtgctggcgctgtaattgtttgatacaaaattattttgattattccgcggcaccgttgctttcattcgcaatataataggatttgccggaggcgcccatgtattcaggaatagtctcggatagcacaggttaagacccgtattcgacgaaataatatgaaaaatatattgattatcagcggccatacaaaccttgccgcatctgtagccaataagacaatccttgaaaccttgaacgaacggctgccggaagctgaaatcgtaaagcttgacgaactttatcccgattttaagatcgacgtggaagccgaacaacagaaattgctgcgggcagacatcattgtattgcaattccctctcttctggtactccgcaccctccatattggaacgctggatggaagaaaccttccgccacggcttttcacacggcagtaccggagacaagcttaaggacaagaaactcattctctctttcacaacgggagcacccgaaacgctgtatagccgtgaaggggccatgggctacgcgattgatgaatttctgccatgctacaaagctgtctgccgactgactcaaatggaatactgcggcagtgtttatacctgcggcataagttacggcaatcgtacgacaccggaacttatcgagcagcaaaagggagcatcggtggaacacgctgaacgtcttatccggttacttgaagcgctctgatgtttgaataatttcgacgctatggccttcaattgccctctatccgatgactgcatgaatttcatgtatgcggaggcggcaggaagcaaataagaacgcagagcggccgggattcctcattggaaatcccggccgacgtctgttgaggatttaagggagggtttattcctcaggcgcgatgttcggctcgctggcgctgatgtagttcagcggattgcagctgtccggcctgcggttgtctaaaagatcctgataaaattttttcttgtatttcaacacttccatttgttttttcaggattcggagctgttcccggagacttttctcctgcttgaagatcagttcggcgcgctccggaatggtggaatccccttcctggcacaggtcgatgtagtgcttgacgccttcaatcgggaggcccgtcatccggaggcagtggaccaggcggagccaccccagggtgtagtcggaaaacatacgggcattccctccgctgcggtccacgtccgggattaatccggcgttttcgtaataccggatggtgtaggttgacatttccatcatttccgcaacctgcttgacagtgtatctgggggtgcggtcataagaagggcggtaggtgccggatggatttttctgtttaatcatcgtgtgactgatagcttacagttactccaatatacgaggcgttgccggatgacaagttttttactgtgcttcacgggaataacgtatttaaaggccaaggaaaacggcggtaactccattccgtggaggaaggaccgggctgtgcgtcggaatatcgggggaaggggggcaaatgagttgactggcttttcctccccgttacaatgaagcccgctccggggacggagcctgtaatgatgattattgcctccctttccgattccgcccgttacgaaatgttgaatcccctgttcaggagagctttcgattttatcagggagattgctccggcaaccctggaaaccggccgccatgtcctggaggaagacgccctgaccgtgatggtgaatgaaccggtgatgaagaagcgggagaacgcccgcatggaagtgcatgaccggtttattgacattcacgtgcccctttcccgggaagagggattcatgtggaaagagcgcgcggcgctggaaaagccttccgaaccgttcaacagggaaaaggacgcgcagcattatgatgatgctccggacacctcttttgtcgtgaaaccggggcagttcgccatttttttcccggaggatgcgcatgccggctgcattggggaaggaaagattctgaaactggtgattaaagtcagaacggcctgaacctcattccggaaaaacagtccggaatggagaacaggccgtttcttcaatttgcgggcgggagttgcgttattttccgtcttccttccgggcgtcctgtaaagcgttttccggaatccatacggccacattgccgccgtggacaagaaaccggccgttgccttccccgtcaatggagacggtttcctccacgttgccggtggcttccttccaagtttcccctgcgtgctgcttgcccacgttcatgactttgtctccatcctctccattggaaatgagcacagccacgccggaatgcgggtgctcttcatctcccacacgggtgaagccgatggtgttcgggtggtcaaagtagtaattttgttccccgaaagcatggtttttacggatttccagcagattgtcgatgatggcgcggtgcatgggcgggttgccgctcacaccgtaatagtccccgtagaagatgcagggataaccttccttcatgagcaggatgagcgcataggcggagggtttgaaccagtcttccacagctgattccagggaactgccccactgggaatcatggttgtccacaaaggtaacggccagcgtagggtggttctgaaccagggttccgtccagaattttggaaaggtcgtaatcgcggccctgcttggaggcctggtacatgttgtagtgcagggggacgtcaaacaggtccactttgtagcgttcctccttgaggtaatcgtccagggattccagatcctgtttccagtattcacccacggcgtagaagtctgctcccctttccttgcggacggctgccaggaatttcctgatgaattcgtcattgatatgcttgatggcatccagcctcatgccgtccagatccagttcccgggatacccatattccccatctttccatttctttcaccacttccgggtggttgaagtccagattggcgaacataaggtagtcgtagttgccgttttcttcatccacgccttcgctccagcttttgccgtctcccataatcttgaaaatggaggttttttccgtgcgtgcgtcatagtccgttccggtgaagtggtaccagtgccatttgaagtcggaatatttgtttccgcggccgggaaagttgaagccggtccagccttcaatctcgtaggcatccgtaatttccttgtcgcggttctgctggtccacttccttggccatgaatttttccgtatagtctgcccctgctttgtggttcatgacggcatccagataaacgcctacatggtgttcgtgaagagccttgatggcctcctggagttcctgcctggtgccgtatttggtgcggacggtgtttttctggtcgaattcccccaggtcaaaaagatcataggtgccgtatcctacgtcattttgttccttccctttgcaggctggaggaatccagacggccgtaacacccatttcctccaggtggggggcgtcttccttcaacttgttccaaaactgtccgtcgttgggcagattccactcaaaatactgcatcatgattccgtttttcatttgatctgattccttgtcataccgttcgggttgtcgtgcttccaggggctgtccggtggaaaaagcggttttcccgggcgaggttccggatgatgaatccatacgaagcccccaacagaatagagtcctgaaagtacggcgcgttaggcatactgccggtcttatgtcctgcaaaaatgccagcggcaaaacggtaggcgggaagggtttttctccgaaggatgggaaaaagcggtttcactcccccctgccgcaccccggaaagaatgggccgggaacgagggttcgtgtaagtaagacaggtgggaagaaagattatgcctttcccgtgccgggaaccaggtagtgcctgtttttcagccggtagtatttcaggaatcggcggatgaagagcagggtgacgataaaggaaagcacgtctgccagaggaagggatgcccagactccgtcctgtccccagaaacggggcaggaccagcaggaacggcaggaggaagagcatctggcgcgtcagggacaggaagattgccagacgggcttttccaatggcctggaagaagttcccgatgatgatctggctgccgatgagcggaaaggccagcacgcagatgatcagaccgttggccgccaggctgatgagcgaggcgtcatccgtgaaaagcccggcaatgccgcggggaaagaagacgcaggccaggaatcccagcgtggtgaaggatgtccctgccagaactccgtatttgagggtgagcagaacgcggcccggcttcatggctccgtggttgtagccgatgatgggctgcattccctgcgtgaggccgatgacgagcatggcgaacaggataagaatgcggttgatgatgccgtaggccccgatagccaggtctcccccatggtccgcaagctgcctgttgatggcgacggtgaccgcgctgccgcagacgtttaccaggcagggagccagcccgatggacaggatgccggtgatgatggtcttgcgcagctgccagatgccgcggcggaagtggaccgtgctggccgcatcggaaaagtgtaacagcacacgcaccatgccgacgacctgggcgagaagggtggccacggcggctccggtaatgccccatttgaaccagaagatgaagatgggagccaggatgatgttgattcctacggaaagaagggtggagcccatggcttttttagggtagccggtagctctcatcacatgattgaggttgaagaagacgtatgtgacgggcaggcccagcaaggtaatgagcatgaagtcgtacgcataggtgagggtttgcccgctggctccgaaggctgtcagaatttccgtaaggaaaagaagcgtgggaatcaccagcaccacagcggcaatcaaactcatgatgaggacgttgccaagcgtacgctcagttccttcctggtcttttcttcccagccggatggagctgatggccgccccgccgatgcctaccagcgtgcccagcgcgaaagtcaggttcatgatggggaaggtgacggccaggccggacagggccagaggccccacaccgtggccgataaacacgctgtcaatgatgttgtacagagagtataccaccatgccggcgatggagggcagggagtactggatcagcagacgccatacggatgcgttttccaattctgcgatgttgcgtgactgggctgccatgggcgttcttcctttcaaaacaggcagcaaactataaaaacgcgcggatgggttgtcaagctgtccacctgtccggaaaacggcctttttcccccagttccagagagagtgctgtttttgattgactgtggaagcttttgggggttgagtcctttccgcctttttcagaagcacgccatgaccatatccgttttccctttcctgcgccttgtctccgtttgcggcgccgctcttatgggttcttcctgtctgcccatgtttggcgccgggcaggtgctggcgggaagcagcctcgcggacggtctgctgccttcttcctctctggatctggtgtggaggggagacatccgttcttttccctcttccggtttgaggacgccccgcgggttcaaagtttctcccgcggattcttattccctgctgatgggagcgcgcccggggattgccggagagtgggcctgctatcatgaccgtagcaattactactgggcttttgtagccggaaagaaggaggaggaagcggggctttacgccgtgcgccgcggtgtggccgtaaacggtatttccggagaaattgaagatgccccggccgcgcaggatgtccggccaccctccgtcatgtaagcgcaggttctggtctttttgcaaaaaatgctgccggagccccgtttcccggcaggttggacacgataggtttgacaggcaggcgttattgcgggcgtattattggccgcatgaagttccttttattatcgtttgcatggatgtgcatggcttgcgccggagcatgggggcaggatacggccccgtcctttccggccaacggagccaattacaggctgtttccggcagagcggcctccgcttgttcccaaaccccagcagcttctctgggacggcagggctattcccgtgcagtccgtgcgcattttggctccgtctccgtccaagacttcctatccggagcagatgaagttcatcgtttccgagttgaagtcttttctggcggagcaccgcgtgaaggtggctccggacgggacgtttgccgttaaattcgtcaagggggatgtgaaaaccggcacggaaaattccaagctgaaggaggaagcctattcccttcgtgtaacttccggcggcgcgctcattacggcgatggataccagaggattctactacggcatgaaaacgctggagcagcttcttctgcgacgcggcgggacgacgactattgccgcctgcgacatcgtggactggccagattttgaaatccgcgggttcatgaacgatgtgggacgcaattacatgccgctgcctctgattgcacgggagctggattccatggcgcagcttaagctgaacgtttaccacttccattttacggagaatcccggctggcggctggaatccaaaatttatccggagctgaacgattccaggaattatacgcgcatgcctggcaagttttacactcagaaggagtttaagcagctggtggaatactgccgcctgcgcaacatcctgctgattccggagatggatatgccggggcacagccagatgttccgcaaggcgctcaacgtgaagatgagcgatgaaaaggccaccaaggccctggtggccctgatcaaggagttgtgttccctggttcccaaggagaaaatgcccattatccacatcggcacggatgaggtgcgcggcagggatgagcaggtgaacaatgagattctgcaggagtacatcaatgctgtggaatcctgcggccgcattcccatgagatggcagcccggcctgacgccgaagggctataacggctccatccagcagttatggtccggccgccagaaccgcggcgcatggcctaccgacggagcgaagtacgttgattccctggaaacttacctgaaccatcttgatccgtttgaaacggccatgacgatgtatttccgccgggcatgtccgttccggaatgcggaaggactgggtatgatgctgtgctctttcccggacctggaaatcacggatccgcgcaaccaggtgcttcagacgcccgtttacgccgggatggcgttcgtttccgaacccttgtggaataatccccatgagaaggtgcagggagatcccaaccaggacgaatacatgaagtatttttccaatttgcccgtgcagggagatcctctgctgaaaggatttgcggattacgagaaccgagtgctcgccatccgggaccgcttttttatggataaggagtttaattacgtgcggcaggcgaatattccctggaaattgctggggcctattcccaacggcggtaagacggaaacggaattcgccccggaagaggacaacaaggcagggaagatgaaggattcctacgagattgacggcgtcacctatgagtggtccggagacgattacacgggggccaccatcattttcaagcattactgtgatttcccgacgctgttcaatggcgcgaagataggagcttatccccacaagaaccatacttattatgcgcagacctggatttattcccccaaggcgcagacggtgcctttctggatcagcggacatacctgggccacgtccgactggcgcaatggtccggcgagcgttcccggcaaatggttccatgcggatcccaaatttttcgtgaacggccgggagattgcccctccgcaatggaagaagccgcgcaacagcggcgtgctggtggatgaaaactaccatttccgggagccttccatggttccgttgaagaaggggtggaaccgcgtgctggtgaagagccccagcaacaattccgcgcgccggtggatgttcacttttgttccggtgctggtgaaccccaagacgcccggatgcaatgtgaaagaatatcccggccttaaattttccacacgcccggaatagaaaattgcgtgatgagcatccggaattggaatgatccggttgcggtgtccgccatcatcattacaaaagaagccgcgctttcggcaaaagcgcggcttctgattgcatgcaaaggacgcgaatatgaaataaagccctccccggcggcgcgtcatcagagcggcaagttccggcgggctgagggaaaccatgggcggttccggcacgggagcacgggaagaaccgcttcattgtagtttcaatgaaagccgggtaattctgtattgttacagtattttccagggaatattttccaatagttcgtcaaagccgagccccgtgcctccgggaacagctgcctgagggttcatgccgcccatctggtcaataaaggggtccggctcaaacaggaggtgcgtgcagaggccgcagaggggaatttccgtgggaaggaagttgcggtaatactctgccgcctggtaaacggcccagagctgccctacggggtgatccatgacggtagtgaagacgggaggctcgtaaaggtattccggcgttgcttcccgcgcgggtttgacgatgcggatgatgggcaggtctgaggaaatagccggctggtgttccacgtccgaacccatgtccagggccagaggcatgccggcgtccaccagacgttcccagctctggatggagaaggggcacgggtcttctatgaagtctatcctggttttcagatggtggggcagggatttccagaatttcagggcatcgttttcattcaggcatccgttgaaatccagccgccagcgccaggaggggaccatggatgccagcatcgtcagccgttccagggaggcggccagattggcgctggccttgatttttcctgccttgaatcccttggattccatgatgcgaatggtggcggggctgacgcaggagggaagcgtggcgtggctttccggaatgtgaagaccgtcaaacaggctgacgcccctcgcgcgtgcttctccgtccgttcgggcgcactccgcggcgcggacgcccaaaggcagagggcggccctttctgagcgcgtccaattcttcctgcagggtggcgtctcccagttccggccacggctggatgcagccgtacccgccttcatccgttttaataagggctcccttcctgcacacttccgcggctctggcgttcagagggccgcaggctgttaaagaatattcatggtaaaacacaactttaattcaaacaacctttccatcttttgtcacgatgaaaaaaggttttcattggattttggagggtgaaacgtctaagctctgcgtcatgtacagaacattggtgttcggagcggacggccgggtgggaagccgtctggcagcgtatctggaagaacatggcctggaggtggtgaagtgcggacggggcttttgtgatttgaaggatttaagcgctttgaaacgtgttctgctttcttccggagccactcatgtggtgaattgcgccgctgtgagcggattggaagcctgcctggatgatccggagacggcccaccgcgtcaacgccatggctccggagatgatggcgcgcatttgccgcctggagggcatgcgctttatccatttgagtacggattatgtgctggacggcaggaggagaggtttgaaaacggaggaggggaagtgccgccccgtaaatgtgtacggagagtccaagctggaggcggaattccgtgtgcgggaggagatgccggacgctctgatagcccgcgtttcctgggtattcggcaatccggaacggccctcattcccggaaatggtgctgcggcgggcaatgaaaagggagcctctggccgctgtggcggataaatggtccatgcctacatggatggaagatttatgtgcatggctccgttttctggcttatgagagcggggcgtccggcgtgctgcatctgtgtcagtccggagagcctgtttcctggcacagttatgccgtggccgtgctgaaatgcgccgtgaagcacgggttactgccttctttgccgcctgtggcggaacaaaagctcgacgaacaggccggtttcagggatgctcggccccggcataccgccatgtccagcgaacgcctctcttccctgatgaagcagcccgtgagggcgtatgaagaggccattgacatggccgtggcccgctatgccgcagatccaacctttctctccagcatttcatgaatgatttccacaattcccgtgattcccgccccaagcccgtttaccgggaccgccgttcccagccgggccgcccgcgcacagctcccaaaaagaacctttttgccaacaagtcgccggaagggagcgaacaatggctcaagccctgggtggagctgaagtatttcacatacaatccggccgtgttcccccgcatgctcggctccgtaagcggggaaatagcgccgggaagcctggtaaacgtctatgacaagaacggcgaactgttcggcgccggattctggaatgagtccagccgcacgcccttgcgcatggtgtaccacgggaaggacgtttttgccgaacgtgacctggatgctgcgctggaacgcgccgtgaagctgcgcagggaagttctgcgcctggatgaaaccactaatgcgtaccgtgtgctgcacggagattccgacgggctgggcggcctggtggtggaccgttacgcggacgtgctgagcctggaggtgagtacgctggccgtctggcagaggctgaaccgctggctgcccctgctgcaccgcctgtgcggcacaaaacgccatgtggtgcaggtggatgagggcattgcccgcatggagggtatccgggcggaggaggcgccggcatccccggcccccgtcaggctggtgaagattgtggaaaacggcatcacctatgaagtggacttcgcccaggggcacaagacgggctttttctgtgaccagcgggacaaccgcctcaagttcgcctccctggtgaagggggccacagtgctggacctgtgctgctacagcggcggcttttccattgccgccaagatgctgggcggagcggcggaggtaacggctgtggatttggatgagaaagccgtcgccatggctaaaagaaacggaaatatcaaccgtcagcgcatcgacttcgtgcatgcggatgcctttgtctatgcgcgccagatggtgcgcaacggccgcctgtttgacgccgtgctgctggaccctcccaaattcatcgttggcagggacggatatgaagagggcatcaaaaaataccatgacctcaatatgttggggctgcaatgcgtgcgccccggcggcctgtttgtcacctgttcctgttccgggctgctttcccccgcggagtttgagcatactgtcatcaaggccgcccagcggcaggggcgtaagctccagatcatggcgatgaccggccccggctgggaccaccctttcctgagcacttatccggagggccgttatctgaaggttctgtgggcgattgccctgtagctggagtttgagccccgggatgcatttcggaaaaacctttcaggcgtgttgacgttttttgcccctctctgctttcgtggtggggaatatggcaaaacaagtattgcagcggctcagttttacggccggggaactgaccccgtggctggccgggcgcgccgacctggaccccgtgtcccgcggtgcctcccggctgatcaattttctggtcagccccttcggcggtctccggcgcaggccgggaacacgcctggtcgcccgcgcgggatgccgggagggcatggtgaggctggtttccttcaagtactccacgggcgtgcagtttatgctggaagtggggcgtggctatatccggtattttaagaatggcgctcctctgacggatgcggaaggcggggcgcaggaaacgcttactccgtggaagacggatgaacaggtaagcaacctccggatgcagcagctgaatgacgtgatttactgcgtggaaccttctacgccgcctatgacgctggcccgctacgcagacgatgactggcggctggaaacgttggagttttccggcatgccttatgagagttccctgctgaatgccgtgcggctggaatgccgcatggtgcgggaggggggcgtcaacaggttgctggcgacggcggacgatgatgtattcactccggaaatggagggaaaggagtttttgcgcatcaccaggaaatatggagaaaccgtggcggagggaaaccagatgcctttttatcatttgacgactctgagccgggacctttacaagggagagactttttccatgaaccgggaggacggctggcggcaggcttatacctgcatccgcgatttcagccgggaaagcgactaccaggaagggatggaccgcccggagaggtacacggctttttttgaaaaaggggccgatgccagtacccgcgtttatgtcaacggcgcgtggacgttggagactacggggacctgggatgcggaatgggaaatctgccgggggtatccggacggctccaactaccttcccaaccgtccggaattagtgtggcattccgtgaagagcttccagcagagggaggggttccggaataatttcaccctgagcggcaatgaagaggaaatgtcctactacaaaatccgcctcatagcttacaaggacggggcttctgtgggaacgcccgtattccgtgcatcagccggctccttcaaccatgaagtggtggtggaggaatatgtttccccgcgcagtgcctatcttgcgaatgcccttcatctgtcctatcatacgctgagtgactgtgataccaatgactggtcttttggtgcgttcggggtccggaatggttatccgtgcacggtagagtttcatcaggggcggctgtggttcggaggcactcctgggcagccccagacgctgtgggccagcagggtggatgatttttccgcgtttacgcccggaattccggcggattctcccatgattctgacaatggcggcttcccagcagaaccgcatttcctggatagcttccctccgggggctgatgattggaaccagcgagggggaatggcgtctgtccgccaccaattcagaagggttgaatgcctctaatgccggatttgagcgccattccggcgtaggctccgcttccctggatgccctgtctgtagaaaacagccttctttttgtgcagcagggcgggatgaaggttcgggaattattttattctctggaggctgacggttaccagacaagggatgtaagcctgttgtccgaccatttgctgggggagggaattgtggactggactgtacagaggagcacggcgttccatgtctggtgcgttctgggtgacggcagcgccgtatgcatgaccctgaaccgggagcagaatgtggtggcgtggcatgcacaccgcctggaacacggccgcattctgtccgtggcgtccctgcgcggttcccgcaacacaccggatgaggaagtatggtttgccgtggcgcgcggggcaggggaggatgcctgcattacggtggaatgcatggcggatgggaatgcctgcctggatgcctgcacggaggctgtcgtgaagggggagatgctgtccggcctgatccatttggcgggatgcggcgcctttctggtgggcggggacggcgcatgcatggacatcagcgttgacggagccgggaatgccgcctgccccggaaagggggatggggaaatagtatccgtaggcctggccgctccggcggaagtaaggacgatgcccctggaaacgcttgagacgctgggttgctttaaaaagcagctcggtgcgcgcgtcctgcttcatgaaagcaccctgaagttccgctacggaacgggagcaccggaagcttggagggatttccagcacggcaggtacggtgtttccgaaccttactccggctacgtgcggatgagccacaactatggtacggatgagcagtcttcctttgccctccgtgtggagacgccggctccatttaaccttctggccctggtgctggatgtggaattgtaggagcaggagcgcgcttacggctattcagccgcttcctcatgggaaagcatgtgcacaatgaccttgatgccgtgtttttccccggcagccttcgccagggagcgaatggcggaggccgtcattccattgcggccgatgatgcgtgccacgtccgttttttccagaatcaggcggaagcggacggcgtctccctgcggggattccgcaacgcgcaattccgcctgttccgggtgttgcacgaattgcagggcgatcaattgcaggtactggcggatttgttctacggcaggatgcatgaagggaaatgtgggttatttccatgaaccctactataaaaccgcctgattgaaaagatgcaattccaggcattccctgaaaaagaaagtcgccccgaccgtaaaacggccggggcgccccaactaccctatgaaactggatcggttaagatccagagagctttttaacgagcgctcacctgctcgtgagcgcaatatagtggaggaaaaggggatacgcaagtattttttcatgggaacaatgtttttattcaatggaaacagcattgtatttttactgcattttgacaatgccgggccggagggaatgactgttgttattgtcatgaaatcatcttccgggaagcagttcataagtgaaccccttcaggtattccgtttccggaatattcaataaaaccggatggtccgctctttggccgtgttgctgcatcaggcgcagggtagccggagcgtcaatggcggcgtcaagcacactctcacggaacaggtccgctccggcgtggtgggaacagcagaaggtggaaaggatgcctcccggggccagaagcttcatggcgcgtaggtggatttccttatatccgcgcatggcgtcatgcacagattttttgtttctggtaaaagagggagggtccaggataatcaaatcccatttgtgttctcctccgtcccggacgagggccgcttcctttttcaggaagtcaaacgcgttatccgtgacgcactgcacggagactccgttcaggcgggcgtttcgcgctacggcgtccatggcgtcctgggaaacgtccacggccgttacctccgaggctccggccagggcgcaggccagggcgaaaccgccctggttgcagaagcagtccagtacgcggcgtccgcgggcgaagcgcgccacggcggcgtaattgtcaagctggtccaaatacaggccggttttttgccccgtctgcaggtcaatcatgaattgcacgctgccgctgcgtgcggcaaaaggctccggttgctgcccccgcgccacccggacggagggggcaatgccctccgccgccagcatgggggaatcattcctgacaataatcccgcggggagaaagaaggtcttccagaacattcaggatgatggggaggcggcgttccatggcgatcgtcagcgtctggacgaccagataatccgcgtaacggtccacaatgaggccgggaagcccgtcggattcgctccagacgagccgggtgagggtttcctccggaagcagacggcggcgcagttccactgcctggctgatgcgcctggaaaagaaatctccgttcagttcctgtttgcggcgggagaaacgccgggcgacgatctgggaatggggattgaacatggcggaacccagaaagcggtccttgaaatccttcagggccacaacgtcccctggctgcgggttgccgaagaccttgcgcacttccgtgccgtaaacccagtcgtgtccttgaaaaatgcgtgctcttggagaaataatcaaacctgccatgtcaggaaaggcaatacatgatcgggggggaaagttcaagggtaatgcgggcggtttcctgaacggatggggaaagggtggaggcctccgtacccggggattttttgcgcaagtgcgccgctgtgcatcattccgggactatttcggttgaaaatgcccggaaacgcagtaaaatagggcgcgttatgaaagtagaaacttttgaaactccccaggatgctgccaaggctttggcaggagaagttgcggaattgatccgtacgcgcgccgctgaaggcaaaaacgtggttctcggccttgccacgggcgccactccgctgcctttttacgcggaactggttcgcatgcataaagaggaaggcctttcctttgccaacgtcatttccttcaatctggacgaatacagcggcctggatcgtgaccatccggagtcctactggtatttcatgcacaccaaccttttcaaccacatcgacatcaagccggaaaacatcaatctgccctccggcacggtgaaggatgatgaaattgccgcccactgcgccgcctatgaacaaaagatcaaggactgcggcggtattgacctccagattctcggcattggccggactggccatatcggctttaacgaacccggctctgatgacaccaccattacccggcaggttcatctggacgaactgacccgttccgacgccgctcctgctttcggcggtattgaaaatgttcccaccaccgccattaccatgggcgtggctaccatcatgggcgctcgtgaagtggctctgatggcttggggtgaaaagaaggcgtccatcgtgaagaaggctgttcaggggcctgtgacggtggaggtggccgcctcttaccttcagaagcatccgaacgccaagttccttctggacaagggagctgcttcccagctttaattttacgttgtagcaacggaaacgccgtctttccctgtttcgtggaaaggcggcgtttttttatgggatgaaggaaggcgggagcttcttctttccatggaggttatatgagataatgccgcctattcaggcgaaagggaaggggtggaggctgggcagggtagattttgtatcatcgtatactaattcacatgttcgtgtagcgatacgttccaaactactaacatatatatggctggtgctgagtggcatccgtcatttttattggagataaccggggatttctttttcatcacgtctgaggcgtgttgttgctggcccaggaactcttcatgatttccggtgaactaagcgtttagttcagaaacaagaaactatcaggaacatgaataattatattcctctaaacaaggcagtcggcccgaaggtcatctgcgacggataccaggctctcatccctcagaagctcggagtcgatgcgatgacgttcaactttgacgggtcggagtgcgaacacgccacttgcgccggagcgccggaaatgttcatcaaggtcgaggaagacggcctgtattatttcggcgtggaagctgacgatacgggcagcctgacgattgccggcgagcaagctataaaaaaggatgggacgcagcctaacattgaaaccgattccaggttcctaaaagcggggtattacaaggtggccctgtcttacgagaacaacgcctataatcccgttcgcaacaatgcggccgcattcaatgtgacgatggacagggaacccattcaggcagggaagtatgaagggaactcgacgatgaagcgggaattctcgccgtcccccaaaatcaaattgtggacgattgaaaaggaatccaacattacctgtgaaccgtccaagaaagtggaactggaatttgaaagtccggaacccgtctatttggaagggcatgctgcctgtaatgtaaagagcattagacctaaaatttgcgtgacggtttgcaaagatgaagcggaaaacgtatggaggtgccgtgtagtttccgtttctgccggagctgaactaaaggtgtatcagggaagctacattgacccctatttcaatcctcctctcaacgaggaagaggctattgaggccgtcaacgaaatgaacggctatcaggcacgaggaagagtgggcacatggcacacgacgcaagcttctctcgcccatgaagaacaccaccgccgtcaatgggaggatgcctacaacttctattggaaggaatccaaaatacaggaaatgcttgaaaaggagactctttcctgcgacgaagaaccggacatgaataaagccgtcaagtccatgcaatcgcttgccaatgaaatggcgttggacctttggacagaaacgtcgacctatgttctggcgttgccggatcaggccaatgacaggccctattgcgccggacaggaagtcctgaacgaagcgaccgcccatgtcatccgtctggccgacgcgatggggtggagcaatgtccccaggttcatcacaaagcccggtacgattgagccgccctgtttcatgcctccggtcagcgaaggggaaacccgcagcatggccgttgcggaggaaccgttctccctgaagctctccattgcggatacttcccggttcgcggaaggcaggattacgctgtgcttccgcaacgaaggaaacgagcctgtccggattccggacgaaatcaacgaagaaacgtccaatttctttttcgtgacgttgttgagaacggaacaggggaaaatgcgcgttttgaacagggaaatcggtaccatgaccttccagcggcccttgaactaccgggagctttcccccggccaggaatacggcgttacgattccggtgtgcctggatgaagtcgatctggaaggctggaaacaatgttcttgtgaactcgaaacgcgctactataatcagcagggtaaggattgtttcctggggatgctccgggcgatggccaaactcatgctgtgatgaagaaaatcctccggaaaaatccttcaggcaccgtggaagaggtcaacagtttctcacagacctgttgccatcccatgattccacatcaaagtctaccctgcctgccccttgatcaaaacttgagaataccggtatttttcgctggtagggaaatattcctctgatgcacaggtgactggccgtgtaacctgatgacaaatcctaccgggaacctcaaagaagcaacaacacacctcagacttgatgaaaagagattttcaccattctcattgaatccacgttgaacattcaccgagccactcctttgggcgaccggctcgacgtatgaaattcagtcttccctatatacaccctccgaacaccgggttccgcatatccattcctgaaacgtacttccagctcatagttctgaccattgcgaagacggtcaaaatgcgtcagcaacaggtaagcttccttgatggggactttcatgcttttctcccggcttcaacgtaatgaagcgtatcaaagccgctacccgttcgattttatacccggctacataataggctattggattctctattttgcccactctgtacccatatcttttccctcccactttttcccatatttcgatatggatattagggccgtcatctttgaggggatagaagtcgtcaaacaggcgcacggtcttttcgcccttgttcgtgaacaccagtttgaagtcagggaacgtctctcttgcgtcaaaccgggtcttttccatcaccacggaacattccactccgttgtcggccatgtccccccatgctgcagcatggagggacaggcttgccagaagtactaaaaactggacagtaaaaggctgcagctatttgagccatgccagaaattcatggttgccgtccgttcccgtgatgggggagggttcgcaccccatccaggaacgattcagctcctccgtgacgaaagtgcgtatggagtccaccgcccgctggtgcaaagccggatcccggacgatgccgccggggcctatgtcttccggctgaagttcaaactggggcttgatgagcaccagggcgtctccttcttttttcagcaggggaaaggcggctggcaggatttttttcagagagatgaaggagacgtcggaaacgatcagatccacttgttcccctatatcctccggagtcatgtagcgggcgttgaatttttccttcacaatgacgcgggggtcctgacgcagtttccagacgagctggttggttcctacgtctatggcatgcactctggcggctccgtgctggagcaggcagtccgtgaagcctcctgtggaagccccaatgtcaaggcagaccttgccttccgcagaaacggggaaggcgttcagggctccttccattttcaggccgccgcggctgacatagcggggacggtttctgatggcgatatccgcgtcttcattaaccttgagaccgggcttggtggagggatgcccccccacgcttacttctccggcaatgatgagccgctgggccagctcccgggattctacgagattgcgggaaaccagaaggatatcgagtcgttgcttgctcatgattcggaaaaaggtgtgaacgcaggtatttcatgaaaccgcatgaagaatcaagaaaaaccgagcgcagagaggcattcgggcgtaaaaatgcggcattcctcgtactggaacattttacgattgattcaaggccggtttataggagactctgcggcggatggaacaccgctacaggcaattgatgcgcaaagtcaggctttacctgctgacggaggtgcgcaaaaaatcgtgggcaagcaagttcctttccgccagtgtttttgattctgtttactggtcgtggaacaggcagtccgtagcgacgggcgccggctggggggccgcggcggcgattgccccgctgcccatgcagagcctgtggggcgtgtttgcctgcctgtggcgcaaggggaatatccccgtagccattctgatggcgtggctttcccctcccggcttcaccttttttgccattccgggccagtggtggctggggtggttccttttttccagcgtggggattcccacctccggggcaaactggcagatgctgaaaacgggggtgcagcagtggtcctgggctccgtttgacgggttgagcatcggcatggtaagcctggagttcctgacgggctggattgtttccagcgtagtgctgggtttcctgtgctacgggctggtgcagcttgcatggggagcgggccacttcctgcgcagtaggaaaaatccgggcaagccttcttccggaaaaggttttggtaaataaagccgccccctgtcatgtgttgcaggaggaagcaagcgtctgcatgggatagatatatattttatggacttctggaatttgaaagtatcattttattacggaattatatagaatagtcttgctgtaagattttcagaatattctggctattgatattcagaaaattgctctgatgaaaaatcgggaagatcaacgaaacaagactaaagtggataattccgttttattattgacgtttatggtgaaaatattatttttgggaaactttcctgagtatgatgtctccctctattgatgccctgttcaagaaatatttacactgcctgatctttctttggtttggcgggggcacgctattgggctgtttttgttcccaggctgaagaaccgttgcctgatggggacacgggagcgctctccattgaatcgaaaactgccctttattccgctgattgttatatcacgggagaagaaaatgaagacgataaaaagagaagttccataggcataggagaatccttcactcttacgttgacgggaaaacctatgggagatattaaaaaactgacgtgggcgtttgtttcagggaaggagctggtggaagaaattggagaagataaacttaaaggaacggcaaaaattacattgtcggtcagaaaagatttgacgcctgatcagcttaagaaccagtccagcatcacattgaaagtcacaacgagcgaaggccgtacagtgaccatgcaagattcgatggtcgtatttttccccaccggaatgaccgccacacataggggagtcggcacaccagaggtaggttgcaataaccggggagctacacaaccttcagcccaactggttgttacattgcagcctacgaacgtctcctttaaaaatattaaaatcattgaacgggatttgggctccgatcccaacaaccctcgaagaactctggatcctggccatacaggtcacggagttgataatgcaatagaggttaacaacgcaaatcgatttgcagaccatcttaaaggaacagttgcccatcaggatattcaggggaaaatacatattttgccacaggagtggaaatggaaatgctcctggcgcgtccataagggcaggggcggaccaatagcaatttccggaaacgacgatgtggggcaaataggggaaatggtcgaacaacgttttaaattttattataacctcaatccacaaacgggaagaataagtgccgtttgtggagaagtatcaaaattcggatgtacggctatggcttattcggatggtaccgggaatcattacaactatttgggacctaaagaaacggattaacggaattagattatgagaatgcagtgttgtcttctttccctgttcatgggaatcgtggtttcttcacatgggtcagattttccagttcccttggagaaacccagtagtatcaaatccttaagggatgttccggaagatatcaaggccttgaatatcttgctcaaggaaaacaagctcgaagaattttacaaaaaatctagggaatggtatctcaaaagttatcctcattcagaagatatagcatctgtacagaagtttttctggcttgcctactatgtttcctccgcgcctctttttccttttgaggatgatgattgcagaacaacggcttcctttaacgacaatatagatttacggcttttgggagatgtttttgatttttctctcacaatagcccggaataatctggattcattcactgtccatcagcccctgaaaaggaaggaattggcgcatcttttcagtctttatgcagcccgcatgttgcacagggtacgtaacgcctatgttaatgatctgccggaacgggaaaaggccgcccggcagaactatcaaaaagcggttgccgaacgcatggaaaaagcaactacgctggaggaaaaacttgatccgtttggagcggagaccggaaggatggcgaggaatttggataacaaaatagtggccaacgacggaaggaacatggagattaaaaataccgttgagaggatggaagaagatttcgtgcctactcttgtccggttgttccctggaaaaaagggggaagtaattaagtacatccgcatggcaggctatcaggaaggggaaattaatgatcttgtggaccgtacggtgggacgggattccagcacggaattcctgtacaagggacgcagtaaaaaggatgccagataaaaccttgttaattttcctttttgatgatcctaagccattcgtgattgtagctggaagctgaaaatacgggagatcccagtggttttcttcattaagccggaacatttttccgatcgtcagacggccacttccatcagcagaacggtcgaattctggagggcctccatggtgatggagtccgtatccgtgatgccggctccgtcccggcggtgcagcaccgtgtctccgatcttgatttctccgtctatcacgaagacgtacacccccgtgttctggcacttgaatttgtattcgcgctccacgccgcggttcagctccgcccaggagaaccaggcctgctgcatgatggagatgtccgtttccggagccaggaaggtggaaatctcattgtgtttcagcaggggagcaatgttgtaatcccggtacctgggaggagcgttgactctgtccggaataatccatatttgcaggaattccaggggctccgtggagctgccgttaaattcgctgtgctggatgcccgttccggcgctcatcacctggatttctccgcgcgtgatggtatggctgttgttcaggctgtccccgtggcggagttctcctttcagggggatggaaaccacttccatatttttgtgcggatgggtgccgaagccttcttccgggagaaccttgtcgtcgttgagcacgcgcagagctccgaattgcatgcgttccgggttgaaataattggcgaagctgaatgtgtggtatgtatccagccatccgtggttggcatgtccacgggaggatgcacggtgaatggtaatgttcataattgatagggggagtgggagcggttttccgcctgcagaatgtttgaccggctgcaactcggggttgttcaaggcgagtgacattatttccagaaccgtaaaacaaatcggcaacacaaattggtggtgcaatgtctcttcttttagggtagcgtgttgcagtacccgtgcaaagaagacaaggcttatggctcagcggacatttatgagatggatcaagggactgattcccacggtgattattttgctgggggcgttgctgctgggctgcatatgctacatctccatctggggggtgccatccttcgttgtgcagcgggtggagaaggctcttctggaaaagggcattccctcccatatagagacgctgaaagttactttgtggccccgtgccgtcgtgacactgaaaaatgtggaattgctggatccggaggccatgccggaaattcgccggcccatagttctgctgcatgaggcggatgtggcgctgaattggaaaaaactgatagaaggacaagtagtgccggagcgggtgaatgtgaaggggatgaacgtcactctgcccgtagatgcggggaatccggaaaaagttttttccgtaacgggggtgaacgcggaattgaatctggggcggcccggcatggtggacatcgtcaaggcagatgccgttgtgcagggcatccgggtgacggcccagggggcatttcccattggtcaggatgattccggagactttacgctgacggctcaggacatggccgccgtcagagagcagttgaatcaggttctgaattacatggaccgggtgaagtggcctgatgcatctcctccccgcctgattgtcaatttaagcgacgatccgaaaggcggcgtgcgcataggcatggatttgcaggcgccttttctcaggtacggaaaaatcatggtcagggatttcctgttcaatggggattacgcagattccgttatcatggccaaacgctttaccatgcgggatgcggaaacggccggtttcgtcagcctttccctccaggccgatttgaaaaagcgcacgctgatctgggatgtccgcagtacggctccgctggtctcctgggcggtggctattgttgatgaagctctggtgccgaaggaaatgaagtttctgagcgagccgcatgtacagatatccggtcgtgcggttttttcggaaaattgggagggcgtggaacatttgaatgctttaggttccgggtccatgggtgcattttccgtgcttggggaaaaattccagagggcctcctgcgatttcagttatgaaaacggtaatttttatgtaactgatctggatataaggcatcccggaggcagtttttccggcaaggtaatgggagtggacggagagattaagatagacgttcacagcacgctgccaatgaaggcgatgctggggatggcccgttccattgccccggaggatgcgaagctgccgccagcgctggaaatcaggggagacccggaattgaaggtgtacggttccgtggatatgggaaagggttggaaaggtccgttccaggtggaccgcctccagattgaggcttccgtgacggatgtcttttaccagggagtggaattcgtttccgctgcggccagggcggaattgattggccgttccgttaatgtcacccaattggaattggtgcgggatgacggccgggtgaagctggaaggcagctatctgggcaccgaccttgtttttacgctggaatctaatctgaaacctgaactgctggagactctggctggaaattggttttctgtccctgaaaatttgcagcttccggaaaaagcggttttatgggtacacggcaggctggatattccggagggcaagcctgtggagccgacgctggtccgcgcacgcatccatgcggaaaatcttgcctggaacaaggttcctgtcaaaatggcgaatgtggaagcggaataccgtcccaaccagctttttgtgcaaaactgccgggtggaaatggaaaagggtgtctttgaattgttcgccaacggttttctggacggtcagatgtttgtgatggggcagtccacagttccgctgcaaacgatagaccaattgttgagcatggaggatgacgactttttcatgaaccgctttgtcttccgcaaggattccggcctggagttttccttccagggaacattgggtttgtacaatctggaaaaggcttacgacttgcaggctactatttctgcaaccaacacgcgctacaggggggtggacttgaagtccgcccgggcggatgcccatctggtgacggatcaactggtgctgaccaatgtgacgactgtggtttccaacggaaattacctgtcttccgccggattgtccggaggtccttcggaatgcacgctcaaggccaagagcatagatttccgttttgtgcaggatacggtggaagtgcttggcctggaaggacaggcctatcccggctataccctgcggatgttttctgatagtgccgccagggttttgaaggagtttgtctttacccggcccgtaacgctttccggcggtggcatgtttccgatgggggatgacatgaagctgatgaagggtcgcatccgctttgacgcttccgccgggcgcgtgcgctatcccctgttgggaaccacgctggatctcggaaggacaaagggggaagtgttgatttccccgcaatgggtggttgtggacaagatgatgggaaccatctgggacggaaccttcacgggccgcgttctggcgcagattgacgatggggatgccctgaacggttcttttgtcctccaggacatgaatttgacgtctatcgggaaatcctatgacaaaaagatggagaaagccactgtgcacggagccattgagttttcatccaagggcggcaacatgaattctattcaggcgaagggggaggctgccctggtgcatggcgacctggtggaaattcccctgttcggatttttgggggaagccctctctaattacattccaggactggggcatctgattaattacaaaatatccagggccgattgcgatttttccattgagaagggttatgtgcgcaccagtaatttcgcggcccagggaagcaacatgtctctggaggggggaggctggatacgcctttccgacttgcaggtcaattcagatttcaagctggggcttcgcggtttgcctgggtttattacttccccggttttcctgttggccggagggctgtttcaagtgcggggaacggggcctttgagcaatgtttcctggagtttcgctccgttttccggaggtaaagcccccattcctcccgcctcggcgcctgcccggaaaaggtagggcagacggaatatttgggtgttgcgcaactgccataaggagccgcatgccttgcagcaattgaaaataacaaatgccggacatctgatagaagacaaggagctgtaaattcagaatgccccgtttacggtgctttcccgcaggaaaaggagttttcaagggaatttctgttttgttttttctttaaaccagagtatagacggaaacagctgtaatgctcaatttctgtagggaagaccagtgaaacaggaggtttttccccgggaatgaaatccggggctgaacggtgccggagcgtaaaaacgcatgaactatggagccggaaagaaatatccccaccatgcaatcctgaagaaggtgcaggagttccttcatggaaaagacaggctgccggtttccgttgaagtgccgcgatttgcttcggccgtccacctatgtgaacgcccgcctgcatgttccatacgggaagatcgtgcggtccggtacgttgctggctggatgggaataagccgattccggggtcggattggctgttcccggcagggcggggccataatggcgttcttttactgaggagaggatgtggctttaccggaaacagtctgcggcaggagaggcggttttaacgggtaaaaaagcaaataaggcaggaggagttggcgtaaaagaaggaagtttttattccggagcggatccgttaaaaacggggcggctgaactgctccagccaccccgttgaaaaagggagttatttaccggattttcccagtttgtacccggcgtaggtttccgtgttgtacaggggctgtttgtccggtacggcgtagccgatggatttgcgaatggcgaggaagtccgccacgccttccggccccacctggttcagaggagctttgtgcagaccggccatcagcaccatgcggcagtaggcgtccgcattttccatgaaccattccgcttcttccacgtcacgtgctccggtaatgactccgtggttttccatgaaaacgacggtggactgtttggccgcttccgccacggcccgggccgtttccagagagccgggcgttccgtaaggggccagcgggatgtgtcccaggaagatatccgcttccggattgatgccggaggggggaacctgtccggcaaacaggaaggcattgcagtgcggggggtgggcatggatgcaggcattgacgcccacggatttcatcatggcaatgtgcgttttcacctcgctggtggaggggcggatgcccgccttctggcgcgcgtccatgtccaccatgcagatgtcttccacagtcatgaagcctttggaacacagggtgggggagcagagcagcaggttctgtgccacgcgcacggagatgttgcccccgttgccgtccacatattcccggttccacaggcggcgccctatgtcgcacatgcgttccttgatgaccagaatttccggggaatggaagaattcattcacttcctcccgcgtgacggggttgtattttttccatgggaacactttgtccggtaggggaggggagattgaccagtcttctgacatatttagtatgttattggttgaacttttcgtaagcggcttcctgggaacccggcatatatgtccggtaggtgatgccgaaggcgtcccgagcctgctccggcgtagagtacaccccggcgcctgcaaaggcaaacatggatgcgcccaataccgtactttctgacacttcagagactttgacgggaatccggagaatgtctgccctcatctgggtccaaacgctgtttctggcgcctccgcccaccaggatgaggaattcgcttttgaagccgcccacggattccaaacggcgcaggcgggatttcagccgccaggtgagcgcctccatggcggcgcggtagatatggccgcgtgttcttcccagcaccagtccgttgatggagcctttccggtctccggaagccaggaagtccggaaccattgtcacgccgtcgcagccgggtgggacggcgtccgcttccgcatccatggtgtcataggattccccgtgaaagcaggctgctttcacccattcgataatgccggagcccagccattggagcccggggttaagaaggccggattccgcgtcagattctgccgtggctccgtcctcataatcttcccgggtcagcctggcctgtgcggagcgcgccatcaggatttcccatgttccggaggaaaggacgggctggtttttgtctgcaccggaaccgaaaatggcgaactgggtgtcgtgcccggcggagataacgggaatgcccgccagggccgggagattcatcgcgtctgccgcttccggcgtaaggaggccaatggtttcccctgcatccacgatgggggggaagaggccgcggctcaaaccgaggcagttcaaaatgaattcggaaaaatctcccgtttccagatccgtgagctgggaggtccctgccatggtccggtctgtcgccatgatgccggtgagcttgtaggccagcaggttggagatgaagagccacgcatgggctttttccagaagttccgggtggttttccctgagccagacgagtttgtaaatggtgttgaaagcaaaggcccccacgccggagatacggttaagttcctcctgggagatatatttgccgatgtttttcatgacctccgccgtgcgggggcatttccaggatatgacaggatagagcaggttgccggcgtcatccaccagcgcgccgtccacgccgaaggtggtaatcgtgacggccgtcacctgttccgcatttagcccttccagggccttcacggcacattcggagagctgtctgaaaatccggtcggcgtcccagacgtgaaattccggattttcctcaccgggcagcgtggcgttcggctgtgaggccttccccacaatggcgccttgtttatccacaaccatggcgcgcacattagtcgcgccgcagtccaagcagagggagtacatgagttaagatttaatagtgaaaagttaataggaatccggctgagcttgttgagttggtttgttaatagaaatgagcattttagggatttctgtgctgtcctggttgacagaggaagattccgtttccgtcaggcttccgtggcgcgcagcagtttaggccgtgcatgcgtcccggaatattccttcagggcgatgcgggggttggaaaagaagtcccttctgcggctcccgtaaacagcttcggataaattggcggcaatgcccgcaccggaacgtaggagctggctgagcaattcccgctcgacgtcctgctttttcaagtgcctgcatcattgaataatgcggaccgcgaaagaaaagcttttcgcggaaacggggctttctgccatgttttatccgaagctgtttactattacctattaactgttgccttttcgttttcagtattttccgtataatggcccgtagttggcgcaggcccggaaatcagctccttccggatccgccgtaccgtggagaccccaggcagaggggcggtagatttggtcatccggaatgttatgggcgtatacgggaatgcgcagcatggaggccagcgtaaggatgtctgcgccgatgtggccgtaagtaaaggctccgtggttggctcccatgttggccatgacgctgtacacgtccgtaaaggctcccttgccggtcaggcgcggggcgaaccaggtggtcggccagcccgggtcagtgcgttcgtccagggtcttgtgcacctcggcaggcagatcaacagaccagccttccgccacgatgaggacggggccgagtcccttgacgatgttcaggcgcatcatggtgacgggagcgccgcccctggtgacgtagtggacggagtagccgccgccgcggaagtattcccggttggccgggcaccagacggcttgttccatcatggttttcgcatcgtccggggtgacgtcccagtgttttttcatgacgggctgtccgtccttgcccgtgcaggccatgcagccgtccagggcggcggagccggaattgatgaggtggatgatgccgtccttggcatggccttccagcgtataacccgtgacgcgctttacggcttccgggctccagtaggtgcgaacgtccgcgaagacattggcctgtccggtcagcagatagccgaagaggaggcaggcgccgttgagagagtcattttccgtggcgaagggaagcggggcgcgtgggccgttccagtcaaaggtggagttaagcagggtttccgcgatgtctccgttcgggtagaagtccgtccagtggcgctggccctggaagccgccggcaatggcctggtaacccagggattcttcttcgcggtcgattttcttgagcttgggattgccctgcatcatgtcgcggaagatcatggccatcagcacgctttccttgaaggttttgcggcgtccggcttcatccagcttcaggtccggacggtttttgtcctcggcgaatttaaagacggaatccgcccattgcatggcgaggtcgaattccgcttcgtcataaattttctggtccatgcggcggcgcacttccgtcatgtccacggcctgtacgcggatgcccaggtaattttcccagaaagactggtccacaatggaaccggcaatgcccatggagcagccgccgatggaaagatagccttttccgcggagggtggctacggcgaggccggcgcggcagaagcgcaggattttttcagctacgtcttccgggatggaagtatccgtggcgtcctgcacgtcttttccgtaaatggagaaagccgggaatcctttctggttcaggccggccagcgcagcggccagatacacggcaccggggcgttccgtgccgttgaagccccagatggccttgggagtgaacggatccatgtcaaatgtttcactgccgtagcaccagcagggcgtaacggccagggagacgccgacgttgttggccttgaatttgtccgcgcaggcggcggcttccgccgggccgccgatgcaggtgtccgcaatcacgcatttgacgggttctccggaggcgtggcggatgttggcctcaataagggcggcggccgccttggccatgttcatggtttgatcttccagggattcccggacgccgaggcggcgaccgtcaatcgtggggcggataccgatggttggtaatgctgttttcatatcttgcgtaggtgatgtgaagctggttcatgcctgggcaggcttttcttcctcttcctttttcagatgagtgttgcggaagaagaagccgtaaattaataccacggcaaagcagatgatgggaataaagaaggatgaccgcaccgctttttccacgaagttttcctgggccgtctggaattgcttcatgtccaggggcagggcgatgaggttgtccagcacttccgcctggtttccggataacgtggagagcgccggaatcagggagaattgctgaatttgctgttctcttccggcaggagcggggaggcgttccagattggctttgaaaacggccagttccctaggcttgagggaggagcagccgggcagggatttggccgcctgctcaaaagcgtccccttccaaggaggggagggtaaagaaggtttccaggtttttctggaatttgccggcggccctagcttgttcttctccgtccgcagggctggcttctgacatcctgtacagcgccagcatggctccagataaggatttccgagcgtccgcagcttccgcctgcgcgatcagaggacggttgatggattcaaaataggccacctggttttttactgtggtgttgtctatccaggaacccatgtacggggtaatgactgcgccgcccagaatggccatgataaggcccgcagctcccagtttcacttcagaccccagtccgcgcagggcgatgccgtaaatagtggggaacatcagggacatgcagccggagattccgaccagtgtccagacggagatttccctggacagatagatggtgcccaggcagcagagaatgccggcgacggcgaaaagggacatcatgttggccgggttaaattttttcatcagggccgtagtgatggcgcggcaggcgatgaacaggatgatggaaaagatatagtagttggaggccgccgcttcctgcattccggggaagacggacatgatgtatttaatcgtccacgtccacacggcaatctgcacgcctacatagaaaaactgggctgccacgccgcagaagtagcgcggaagcttcaccagtttcataagctggcagcggtagtccggcatgatgagcaggaaggcgatgggcccgatcatcataatcaggatttgctgcaccatgctgaattcgaaagcggaatagtactggaacaggaaggggatgagaatcagggcgatgcagagtcccaggcggccgagtttagaggaaaggggctgtgtgttttcccgggtgggtacgttttcatcgtcggatttgtaacggcagaaaaagaaccagatgacggcggcgatggctaccaggcccacataaggaacgcatacccagaaaagttcatcgctgacaatggcgttcagttgttccgggtccatggctttgcgggtgtccatgtccgcatcgttcaagtgtgccagaatgaaatatttggccaggaaaatacctgtcagggagcctatgggattgaaggcctgggcgaagttcagacggcggacgctcgtttcctgggaccccatggagagaacgaaggggttgcaggtggtctccaaaatggagaggcctccggccagcacgaagatagccatcagatagatatcgaaactttgcccgatggcggcgggaatgtagcacagcgcgccgatcatgtagagccccagcccgatgaggacgcccgccttataggaaaattcctccagaaggatggaggcgaaaatggcaagcaccgcataggccccatagaaggaaatctgaactccggcggattccgaagcattgatcatgaatattttgctgaatgccggaaccaggttgtccgtcatgttgttcaggaggccccacagcgcaaaacaggagaccagcatgaagaacggcagccggtattgtttgggaacgatcggcacggtagaggtacggttgttatccatattgcttttgtcaatttctcacaaggacggcggtgcgtcaatctggaaaccgaaaagagtccagaaattatccaacctgttgataaaaaaaataaaatgatgtttttccatggtgatattccgtcagtgtccgcagaagctctttcttcttcttgacttgtgtttccgcggcggataggaatgaagagatgaagaagagtattctagccgtctgtctgggcctggtcggattctggagcgttctggctgaagattctcccattgcggccccgggaagggtaaatgaacagggggatgcggaactgccttccggggaattgttgtcggatcatgtggcggaagcggaatttacgggaatgattcatcggaaatgcaggttccttacttccctgtgcccggacaagtgcgaccatgccagggatttcgccgttttccggatcgtcaagtacctggattaccggaaaccaggcaagtacggcgatgaaaagcaggagcagctgatggttgacgttaatccggcgcacaagcccatcctgcagagtgcggatattttgaagaagatatccgcccttaaaccgggggacaaggtggttcttcactgggctcattattatatgcaccggaatcccagttctttcccggaacgtcccgtgatttccgtggagccggcggctctttccggaggaaaaacgggaaagtaaggactggtctttcctcaggccgttcaagcggggctggacgcaacggaaagccgtgtgttaggaaacggaccggcaaataacgctgctccgggcaagattgccgcggggggcggcgtatatatcccgcgaaacacaccataaatacgatgcgtttatctttgaataaattaatggggcttggcctgttgtgcgcactgggcctgtctattccctccgttctcggcaaggaaagctttgagcaggccaggcgtggcaagtttacaacgctttccaccaaatacggccttatgtcctgccggaacggtgtggcggaaatcggaggagggggaaaatccggagaagcctccctgcgaatgttcggcggacaggatgctgaattgaaactggacttgaaggatacgccttccagggaagtccggctttctgcctgggcggagcgatggaccgggcaggccccttttgaattttccattgtggccatagggccgaatggagaaaagaaaatttatgacggcaaggatatcaggacgggcgggtttcgtaccaggatagaagccagtgttccttccggaacgcgttccctggtgttcaggcttacttctccggaaaacaagggaatgaagctggacgacctgtttcttgttccctgtattcccatgaaagtgaatccgcaggtggagatggcctcttccatttacccggtgatggtgcgtatcccgtgcagccccgttctttctctgaatgtccggacggacggctgccttaatcctcagttcctgacagctgtcaatctggattttacgggtacgacgaagctttccgacattgagtccgtggctgtaatacggggggaagaggcccctatcatccatcatggggaagagccgttcccgaaagactcttcccaagtttttggtacagtaaagcttgccggttccgccagaccccagatttctgtgaaggggaaaatggagctggagcccggagacaattacctgtgggcttgcgtgacgatgaaagaaggagcctccctggacggcagggtggtggtgcgtccggccagcgttgtggcgggcaataaaccggtgagggttgccaatgcgactcccgtggcgcagcgcatcggcgtggccgtagtcaggcatggggatttcaaatcaaaattctaccgtattcccggtctggcccgttccaggaagggaatcctgctggccgtgtacgatatccggtacaaccattccggagaccttccggccaacattgatgtgggcgtaagccgctctacggacggaggccgcacctggtctgatgtcaaaatcgccattgatgattccaagattgacccctctctgggggctaccaggggcgtaggggatccggccattctggtggatgaaaagacggggcgcatctgggtggccgccatatggagccacaggcattccatctggggcagcaagtccggagacaattctccggaggcctgtggacagctggtgctggcctacagcgatgacgacggcctgacctggtccagtccgatcaatatcacggaacaaaccaagaacaaggattggcgcattttatttaatggacccggcaatggcatttgcatgaaagacggcacgctggtcttcgccgcccagtactgggacggcaaaggggtgccgtggtccaccattgtttattccaaagaccggggaaaaacctggcactgcggcacgggcgtcaaccagcagacgacggaagcccaggtgattgagctggaagacggctccgtcatgatcaacgcccggtgcaactggggcggttcccgcatcgtgggcgttacgaaagacctgggccaaacgtgggaaaaacaccccaccaaccgcactgcccagctgaaggaaccggtctgccagggcagtctgcttgccgtggacggcgttccgggcgcgggcagagtggttctgttttccaatcccaataccacatccggacgttcccacatgacgttgaaagcttctacgaatgatgccgggtcatggccggaagacaaatggcttctttatgatgcccgcaaaggctggggatattcctgcctggcgccggtagataagaaccatgtgggcgtgctgtacgaatcccagggggcgctgaacttcctgaaaattccctataaggatgttcttaacgcaaaaaatgcgcgctgattccgtttcccggtaacatgttcaacgggccgttttcgttggagaacggcccgtttttttgtttccgggtgtttttgtgaaaggacttggccgctgcgctacgggttatttgccgctaaagacgggaaactgtaccaggaaccggatccccaccctttggcgggaaagccggcggtgtgttcttaacttgttttgaggacgccattgtcaggataaaaaggaagcaagagcctccttcagcatgtttctggcgcggaacagcaggcttttggtagcgggaaccgtcatatccagcgcccgggctatttcctcatagggcatgttttcgaaacggcgcagttggacggccagccgcgccttttccggcagagcggcgattgccgcgtccacggcgtgctggagttccgtatgttccagtgcttcgtccggggtctgggaaggttccagaaacacggccatgcctccttcctcctccatggcgtctgcggaggtggtgggcttgcgcttctggcggcgcacttcattgaacaccagattgcgcaggatggtgaacatccatgtggtaaaccgtgcggaaggttcataattcccggctcccttccagatgcggatgaatacctgctgggcgatgtcctctgtctccggaccgttgttcagcatacgggccaccgtcgcatatacggaattctggtgtttgcggaccagcatttccatggcggaagcgtcgccattcctgaccctcagcatcagcttggcatcttcgtctggttccgcaggcggcatgtcttgtgcttcatccatgaaattcccttttataaaccccgtctccggtgaaaggttgcagccggcagggcgcattccggaaaaaggtctatcccatttttacacggctgactagatgaaaacgggtctttcttttctttccgcagggaatggaagtaaaatgttttactctttccaaagcccgggaaatattcgcgcctttgcaggagagaacccggtgcacgatggattccctccatgcccgccgatttgacaggggccggaaggggcttgtcagggcagggaagaatggaagaaaggaatatcggctaattaatttgtttaaggaatcattccgaatttcttttctcggcttcttcctggttcagttccaaatggggtattccctcagaagtttatgaagaaagcatgaaggaatgcatggagcggaaaacagggattcctcaatggtacgttattgtagacgggcagcggaataccattgcgggagccggagtaattgaaaacgattttcatgaccggaaggacttaactcccaatttatgtgatctttttgtagaggaaaggaaacgcgtcaggggaatagccggggtggtgccggattttgtgaggaaggatttggcctctctcggatatcccaggctcccaaccacactccgcgcggaaagaagagcaaggaatgaagaaagttccccggcaaaaggaaaagaggggaaaataatgaaaaaccgtccggtgttttcgttggaagatgcacggagccgcctgccgggggaggactctgttcttgacagcatttcctgtctgcctgataacttgataatacgagtacccctcagcagcatcaggaaacgccgccatgaaacaatgcatgaattccgaaaatttgcatcgccgcctcaagaagattatcggacaggtgcaggcaatcgacaggatgattgacgaagacgttccctgtgaagatgttcttgcgcagctcaatgccgccaagtccgccttgcataaggtggggcaggtcgtactggaggggcacatcagccattgtgtccgggacgggctggaacacggagacccggaagagacgatcgcgcgcttcaccaaggcggttgagcggtttgccaacatgatttgaatgggacaaggggttaatgcctttttccggcaggttcgggggtggctctcatatttttttcttgaaaacctatacccctataggtatataaatgcccgtacctgtatgggtataaaaagaaaaatcatcatatgctggaccgattggaaaaattgctggaatggggagggacaaggcggaaagtcgcactgttgtccgtttccggattagctctgttaatgagcatgcttggcatggaacctttgccctttgaagtttcatggatagccattgtgctgtgcggcgttccagttgtgctggaagccgttcttggcctggcgacggcctgggatattaaggcgggagtgcttgtttccatcgcgttgatcgcctccgtcatcattggggaggacttcgccgcaggggaggttgcatttatcatgcagcttggggaactccttgaggagctgaccgtggcccgggcccggaagggtattgaaaggctggtccgtttgaccccggcgaccgcccggaaagtggaaggaaccagggaggaggttattccggcggaagaggttcgcatcggggatattctccgcgtattgcccggagagacgattccggcggacggcgttattctttccgggcacacttccgtcaaccagtccgtaatgacgggggaacctcttccgatagacaaggaagccggggatgaggtttccagcgggacggtcaaccagttcggaacctttgacatgaaggcggccaggaccgggaaggacagttccatccagcgcatggtgcgcctcgtccaatccgcagatgcggggaaggctaaaatcgtgaggctggcggaccgctgggccacctggatcgttgccattgccctggtttccgcaggggggacctggatggccacgggcgaattgattcgcgccgttaccattctggtggtattctgtccctgtgcgcttgtgctggcaactcccacggcggtcatggccgccatcgggaacgccaccaggcatggctttctggtgcgggaaggggatgccctggaacgcctgtcctgcgtgtcccatctcactttcgacaagacgggcacgcttacctgcggtgctccgcgcgtggcggccgtgcgcagtttcctgccggagctcccggaacaggaactttacagatatgccgcctgtgcggaactgcgttctgaacatcctctgggcaaggcgattgtccgctgttaccggaaagattcagtgcgggaacttccccaaccggaacaattccgcatgattcccggcaggggagtacgggctgtggcgcagggaaaggaacttctggccggcaacctggaattgttcagggaaaacggggtggagctgtccgatgaggccagacgtgcggcggaacggtatcaggaggaggggtgctccgtgattttcataggaatggaccggcaggccgcagggttgatcgccctgtcggataccttgcgggagaatgccgtagctaccatccgggaagtacgggatgccggagtggttcccgtattgctgaccggggaccatgggaatgccgccgcgcgtgtcgccggacaactggggattgacctggtttgcgcggaatgcctgccggaggacaaattcaactggattgacgcgtgccagaaggagcggaaccgtgtgtgcatggttggggacggaatcaatgatgcccttgctttgaaaacctctcatgcgggaattgccatgggcggtataggaagtgacattgccgtggatgccgcagatattgtcctggtcaatgacgatatccgggaactgccccatctgctccgtctgtcaaggcgcatgatggggacaatcaaatgcaatctgacattctccatggctctgaacttcatcgccatcatcctggctgcgggcggcatcctgagtcccgtggctggcgcgctggttcacaatgcgggatccgtcgtcgtgatcgccaactccgtttttctgctgaaatggaggaggaaaaacgcgtgaatctgcctggagggtagagaaacttccccgtgttgattgccgggagggaacggagtctgtctttttggcgctccggtttcaccgcgccgggctggaaaacgcttggatgaaaagaaagtccgtgttattctttttccagttcggcaggggtgcccaaataaaggctgagattgcgggaacggcatgctgtttccgcagaacccttcaaacctgatgcgaataattccgccgcagggagttcgatggaacgggcttgtcccgtttttcggggaggtttcgtttccgctgttcccctgccggaacagaacagcactcatcccatgaacgatacctccaatttgtcctatcccggttcccgccgcatttatgttccgggccgtctgtacccggatgtccgggttcccatgagggaaatccttttgagcgataccttgctgcccgacggctcctcccatcctaatgacccggtgcgcgtgtacgattgctccggcccctggggggacgctgcgtatgaagggactgcagagaacgggcttccccccctgcgtgccgcctggatacgggcccgcggggatgtgaaagaggatgaggagcaggagcgctccctgcgtgccgcgggggaaacgcctgtgacacagcgttattacgcccggcggggcgttattacgccggaaatggaatttgtcgccatccgggaaaatttgggcagggaacaggttttcaaggcgatatacgaccgctatccgaacgctaaaagccgcccggacgaggttgcggaagctctggaaacgcttaccatgatgccgcggccgtccgaattggaggcgcaggaaggatttgggccgtccagcatggtggcccgcgaccggctggatcaccagcatgccccggaacgccggaagggctgccgcatgcctgcttactttacgcctgaattcgtcagggatgaaattgcctccggccgtgcgctgattcccgccaacatcaatcatccggaatgtgaaccgatggccatcggtcgcaatttcctggtaaaaatcaacgccaacataggcaactccgcgctggggtccagcattgaggaggaggtggaaaagctgcgctgggccattcactggggggcggataccgtcatggacctgtccaccgggaaaaacatccacgcgacgagggaatggattttaagaaactcccctgtccccatcgggactgtacccatttaccaggctctggaaaaggtgggaggaaaggtggctgacctgagttgggaggttttccgcgataccctgcttgaacaggcccgccagggcgtggactatgtgacggtgcacgccgcccttctgctcaggttcgtgaaccatacggcgcggcgcatgacgggcatcgtttcccgcggcggttccatcatggcgcagtggagcatgatccacgaacaggaaaatttcctttattcccattgggatgaaatttgttccattctggcggcttacgatattgccgtctccatcggggacggcctgcggcccggttccgtggcggacgccaacgacttcgcccagctggcggagctggaagtgcagggggatttgaccatgcacgcatggaaagcgggcgtgcaggtcatgaatgaaggccccggccacgttcccatgcaccttattggagagaacatgagcaagcagctggaatggtgcatggaagcgcccttttacacgctggggccgctggtaacggacatcgcccccggttacgaccatattaccggagctatcggaggggcgatcatcggccagcttggctgcgccatgctttgctatgtaaccagaaaagagcatctggggcttcctgaccgggaggatgtgagggaaggcgtggttacctacaagctggcggcccatgccgcagacctggcgaaggggcatccatccgcgcaatggagggataacgctttggcccaggccaggtttgaattccgctgggaggatcagttcaacctttccctggatccgcaaaaggctcgttccttccatgacctgacgcttccccatgccaacgccaaaaaagcccatttttgttccatgtgcggtccggacttctgcgccatgcgcctgagccaggatgtccgccgccgctcgcaacagtaggcgtctttgttcaggagtttctgatgaagccggttcttcttaaaaaagaatgacacgcgcagggatgatgctatagtgcggttaacatgagaagttcattttttcctgcaattggcgttctttccttggcctccgctttgatttgttccgcgtcttcctcctgggagactgattggaataaggcgctggagaaagccggaaagagcggacagccggtactggttgactttaccggttccgactggtgccccggatgtatttatctgcgcaagaatatttttgacacggatgcgttcgccaaatatgcggcggatcatcaattcgtgctgctggaactggatttccccaaggctgccgggaaaatgccgccggaacagctgaaattccatgaagagctgatgcggcgttacggcgtttcctcgttcccgactgttttgctgatggaagggaatggcgctccttatgctaaaataatgagtgcgaccaggacgccggaggaatatctgaagaaactggaggctgccgaagaaacgaggaagaagttgaaagaggctgtggcggcggccctgccgctgaaaggaaaggaaaaactggagcagctggttaaggccctgaacgtgcttccggaagatttgcagccttttcagaaggagttgattgcagaaatttccgtcttggacccggaagataaatacggattcgcggggaagtctgaaaaggctgcaaccatggagaagcaacggcttatgtgggagcaattctgccggaaatattcggggaaattctctgcggcagatatgctcgccgcccgtaaggaagcattgaatatgctggaaaataaagacatgctccctccgattcgtctggaaatcgccaaatatatcagcgatgggtatgcccaggaacgtaatttccccaaggttctggaatacttgaaaattgcccgggatgccgatccggaatcacaggcggccaaaaagctggaaccatggattgaaaacatgcggaaatttgtcaatcaggagaagtagaagttgtgtccggaaaggcatggcagcctcccgcgaaaggccgccatgccttttcattttttattttaaacaaaaaaatggggctgttgcgctatggctgatgaagggaacgaatatgtagaaatgaatacgccggcctatgtcagaaaagaggaggtgattgagggagaaagcagccatttgctgagttgggatgagtggctgcgggaacatgctgcccagttgctgttgtttgcccgccagcagtcccgctcaccggaagatgcggaggacatacttcaggatgccctgatacgcctggcgcgcaaggaggcctccggggaatttgtgggagggcaggaggcgtggctctcctatgtctttgcctccatccggcgtttggcggtggattatggccgcaaatccgaccgccgccagaaaagggaggatgaggcctgcgcctctgaacgggacgaagatgtttatacggacccctggttttccagtgctgcggcagatgaggaactcaaacagttcatggaaatgcagctcagaaagctcccttccaaattctccgaggtcattgtcctgaaaatatggggggaacaaacttttcagcaaattgcggaaacgctggaaatctcgcagaatacggcggcgagccggtaccgttacggtattgacttgctccgcagggctttgagaaataaaaagaatcaattctaatgccgctctacccttatgaaacatgaaacaacatcatccgtcgcaggggaggaagacggcggtactgccgctctgcagccccttcccgtatctgatgaatttatttcccggctggccggaaagtgtgaggaaatcttccctttgaacaaccgtctccggcgtgatgaaatctccgatgatgaaattcatgagatggaatccctcctgaaacgccttcggccctctccggcaagggtcctgttcagggagcagtgctgtgccctgatgtgtgcggaatccgaacatgagatggaaacccggttgaaaaggctttccgcttcttccatgctggaattttccgtttgtaaaatggcgcaagccatgaattgcgtcagtgatgaaaaacaggaaaaagcgttcagcatccccctgtggcggcgttttgcctgtatttccggcatttccgcggctgcctttgtgggggccgtcatgctggttcaacatgctctggtggcgcccgtagggacggtggcagccgaaaatgccggggaagtttcctcggaaaaggctgaaactcctgtgattcccggtgaaaagcgggagttgctccggacgcccaccctttttgaattgcagggaggggatgagcgcgtgcctgtgattgctcccgccgttatccgcaaaattcttcctgaaaaggaatattaaaatttgcggtgcatgaatatcgccggaattgtgcgatctgctgcggcattgcggctttccttggcgggcaggaaagatgcctggcgttttccggtgttctgcggcgaaggatgccgacccggaagcggcgaaaaaaatgtacaaattttgaacattgtatggacagatgctgtatattatctcacatggatatgaaaacctgtatctttctgacattgggattgctggtaggttcgggctccggatattccattgaccggcccgcaggaagtacggacaaccttcagccgcctcctctgacaccgtatgcgcatcaggtgaagccgctcccttcttccaaaccggccagactgggaattgttccgggcacggtgccccaagcgctcgttgcgcagctggagcttagcggatttcccggagtgctggtgaccaaagtgatgccggacagccccgccgccaaggccgggctccaggaaaatgacgtcatggtcaagctgggggatgtctccctgtccggtccgcaatctgtaacggaagccctgtctgaaaaggtgcctggagacaggattacggctgtattttaccggaaaggaaagagggagactgttgaaattaccctggatgggggaacgctttccgctgaagaaatactggcggcccagggggatccccgcacgcagccccgcgcagttccttccgtccggcgtcagacggcgcctttttccggaatggctgcacggcctaatctcccccagcgtattctggatatgcagcagatgatggatgagtttttgaaggattccgccatggatgattaccggatggacgacatcatcagccggatgaacctgactcccggcgcggcgcaaatgctccggagcttgcagggacttcatcaaatgcccatgcctcccatgggcaaggtttccggagggggccagagcacgtcttccgtccggatgtcggatgccaacgggactatcgtggtttcttccaattcccggacgggaaccacagttcatgtgacggactctgcgggaaaggttctgtattccggcccctacaatacgcaggaggaaaaatccgccgtgccggaagccgtcagggaacgcttgaaaaacatagaaaccaatttctgcttttaacggcttcatgaaatagcggagaaatccgtattcatgaagttgacgacagctgccccgtgcggggcagcttttttattcagtgaaagggaggggaattctgcaatccgtccacaagccggcttgccggaaggagctatagaattccggtcaacttccggtaagtctccagggcaaaagaatccgtcattccggaaatataatcaagcatgtgcgccaggcgtgcagcctcccctccgttattttggggcacgtcggtgccctgaagcatgatggcgattttttgggattgtccggaggacggatgattcacccattccataaagaagtcgatcaattcgcccagaaccttataacccatggcttccacttcaataacctccctggcctggtacacattcttgatggcgtactggtacaaaccgttcagcggggcggacaattccgagctgtctatcagggattgttccatccttccttgcagcagatcttcctcgtggttcacgaaactgtccacggcggattgaatgctttttccgatggcgatcgcgcgcatataatggatgcaggaatctttttcctcttttgcttccagttcccgaacataacagagctgggattccgtcaggaaagggctgaataaatccctggtgggagcaaaatccagaaggccggaaaagtacccgtcttcaatatccgcgatgcggtaacagatatcatccgcagcctccattaaatacgccaggggatgacggctccagcaaagatgggctgcatcaggtgtggaacgcgggatcagacccagatggccagccatgaaagaagccgcttccctttcctgttccccgatgccgaattttttgcattcaagcttgttggccgcaactatgctgcctttcttgacggcggcggaataggattgcgtacagggatatttcataaaggagcccaaaacggctgccgtcagtttcaggccgctgccctccatcggatcccctgtacgtgtcaggatgcggaatccctgggcattaccttcaaaaggcagctccaggccgtgccgtttcagggcggtttcaatggcgtcttctccggaatggccgaagggcggattgccgatgtcatgggccaggcaggcggtggaaacaatggtggcgacatcggaaggcatgataggagcgggcagggaaccctttttggccagccactcccccgccagcatgccgagggaggaaccgatgtgggctacctccaggctgtgggtcaggcgggtgcggacgtaatcattgcggcccaggggaaaaacctgtgtcttgtcctgaaggcggcggaacgcgctggaaaacagaatacggccgtaatcccggtcataattgctgcggtttttctgcggagatgccgtgcttcggtgcctggacccccagcgtgcgtccgacaaaagctgctgccaattcatcatccctgacatggtaaagaaatgctacaggggaatgcccggctggaacagaagaaaatagagagggcattcaataggtcagcgtcaattccgctccaatttcaggagcaccttgccgtccgtgtcaatgcgcgcgtccgcaatcaggagcgtgggcggcgtgtgccgggcgcacaggttttttggtgaatctggcgtaacatgtcgcgttctccggccaccgggcggcggcaagcagcacaaaaatgaaggaaaatgggcgtctggaatttattcctgcgcagtttttttgaaggggatggggggcgatcaggaaagaggacaggataagcaggcagccgatgaacagcaggaacatgttgggatgctctctgaacagaagcagggaagtcagagccgccaggggaattttaagattgttcataaccgccagcttcacgggagtgacccgccgggcgccgtaattccagaggaaaaaacagactcctgaagcgatgacgcccaaataggccagcagccaccattgcacggcagaaatcccctgccagcaggacagccctgacagcaggccggagggcaacgtgaccagcagagcgcctgcataggcataggcgaagcaggaagcttcacttctcccgaaccgggaatttttcaaggaaatgtaggctatttgacctgccgcgaagcagagattggaaagctggacaagaacaattcctgtaaacaccccgttaccggcggaatatcctttccaaaggatgcccgctcctcctatggccgcaagaatagccgccgccagatggagcggcggaagctgttttttcatcagaccgttaatcagaaccacataaatcggcgtggtggctgtaaaaagggcaacctggtgggaaggcagatagtgaaaggccgcgatatagcaaagatacattcctccgaactggacggcgcctatgcccatcatcaccaaggcatgactgaaaggaaccctccggacgaaggggaggaaaacggcaagcgagccggccatgcgcgtcatcgcgacaaagctggcagggaggccggacaggcagtttcccagaagtccgaatgacaacgcccagatgaaagacgtgatcagcaacgcagacatgcgggcggagcatacggagaaagggaagtcaagtcaatgcccgtactgtcgggagtacgcaacgttcatcaagaaagcaatggcgcggttaagctttcctctcagtagaaattaagctttttgtgtataagactgtttaatcagggtaagtatgtaatccatcctgtcctcattttttacagtcagttcgtaagatccgtttccatgatggccgatattggaaacgtctctagcgagtttgtaggggtcttccaatttcccttttggaagattgagccagagtttcagtccttgtttctgtaaggcgatatccgtgaaatttgaaccgttgaccgtgaaagctacataaagcttggtggctttgatttcgacgtcccctaaatcgaggattttatttctgaggctgttgtaaataccctgtaccttttccggaatgttcttcaaccgatcctgctccgtgtaaactactacttctttgctgacagcatctacgtcgctgtttttcgatgaaattgttttgatgctttccgttgcattgagttttcggatttcctcaaaactgatggtttgattgctgtatctttttatctcccacagagcaatcggaagatctttaaaattaatggcttctttttgataagaggtaaagccctgggaaataaaaataacccgggattgagaccaatccacgctactgcgcttgagcagttcattccgggcttcattgtattccagaatgaaatcggctttattattaagcattgcagaaagataggcatagccttggtctacaacactaaaatttttgtcctgcttgtattcgatgatgacaaaagccttattttttctgtcaaaagccaatgtatcaattctcaacctctgaacggaaccggatatcgtgaattcggatttgacgaattccagcccaagcaacgtatttaaatttgcttccaccaaatgttgaatttgccgttccagctggaatgggatctccttgatttggttcaatatttccagttttgaatttgaattgaaaagcggcattaaacagatgggagaaggttacttgatccatattatctttatgagggatggatgacaagacaatcattacgaagcaaaatgggatatctaaccaatcgagtattatctgctgactgttctaaatataaaaacaccccggaatattgaattctggggtgtttagaaaaatggtacgcggtactggtttcgaaccagtgaccccatgcgtgtgaagcatgtgctctaccactgagctaaccgcgcatttgcagtgcgggggggaatatatcgttcgtgtcggggattggcaaggagttttttgaaatcgggtaaaaaaggatttcgcttttccgccgtcaacaagttcccggaggaatgaccggcatgctgtctcttcgaggaacgtttggaaaagtggaaaggtggcttaattccggcttgtacagcatcaaccgtcttcctacactccgggcatgagttgcacaagccctcccagagcatgggcccagattgataccaatgcgttgaggcacaatttaaacgtcgtccggcgtgttatgccggatcaccgtctgatggctattgtgaaggcagaggcttatggtcacggtctggaaggggtggtgaaggccctggatggcgaagattgcgcttttttcggcgttgccacggtggcggaggcctgccgggtgagggatgccggggcaaaaacatgcccgtttattctcggtccctgttttgagggggagcgggaggaaatcgtgcagaacggctggcgcgccgctctttccagcatggaagaggcggagcatttcaattccttgggcgccctttacggcaaaaccgtccatgtccatttgggcgtggataccggcatggggcgcagcggttttttaccgagtgaattgcacggcctgacggacaagctcaaacagttcagttatctggatctggagggcgtgttttcccatttatccgcagcttccgatgatatttccttcacccacggacagatcagcggctttacggaagccgtaaatgaactttcccaaggccatcggtacaagttccggcacctgtgcagcagcgccgctgtgtttaattacaaggttccctgcgccaatatggcgaggctgggcagaatcctgtacgggtattcccccatgccgtctccctataataaggagctgcggcctacaatgaccctgtacagccgcattactctgatacgcacgctgccgggaaatcacggcgtttcctacaaccactgctatataacgaaggggagcacgaaggtggccactatcggcatcggttatgcggatggctatcttcaatatctgtctaaccagggagcgagggtgtatatcaatggccagtactgtccggttttgggccgtgtgacgatggaccagatcatggtggacgttacttacatggaccatgtggagaccggagacctggtggaaatcatggggcctaatgtaagctgggaggaactgacgcgccgtgccaataccatccccagcaatgtgctgaccagcatcagcgcccgcgtgccccggatttacgtgtaggataatgccgggggcatggtgattaaaagctgttgcccgccgcccgaaaaaaatcaggggatttgtttgcagatatgtttttccccggcggacacggataaacgttttaccgtaccttttaccgctggcggattctattccagtcttccggctccagagcgcagggatcaggggctacccagtggtccggttctatttccacaggggtaaggtccgctcccaccgtctccggataggaggggtgctggatgcgatggccgaaagcagagccgagcggcgggttgatgggagaggggacgtctcccggcagaggctggtgcttgttggccctggaggggtctggttccggaatagcgtccagaagagccttggtgtaagcatgtttgggggattgatagatggtttccgcatctgacatttccacgattttacccagatacatgaccgccacgcggtcggagatgtgtttgacgaccgccagatcatgggcaataaacaggtaagagagtttgcgttcctcctgaagttccagcagcaggttgagcacctgggactggacggatacgtcaagggcggagacgggttcgtccagaataatgaggctgggatttaacgtcagggcgcgggcgatgccgatgcgctggcgttgcccgcctgagaattcaaaggggaagcggtcaatagcgctgtccggcaaccctacgcgatccagcaggccgcgcacccattcccggcgcgcggcgggggtgcccatgcggtggatgacaaagggttccgctacgatttgaccgatggattgcctctggttgagggattccgcagggtcctggaagaccatctggatgtgcggacgcagaggcctcattttgcgctgggagagtctggcgatattgttgccgttgaaccggatggagcccccggtgggtttcagcaggcggacaatgcttttgccaatggttgattttccgcagccggattcccccaccaggcccagcgtttcccccgggtaaatattgaaggaaacgtcgtccactgccttgacccatcccgcttgccgcaggaaaattccggagcggacggggaagtacattttcaaattgtctacttgcaagagaggttccggcatggctggtagaaaaagaagttaaaggttggcgcaacgggggcaggcttccacgaagtggtccggggatatttccacgaggggagggcgttccgtgagttcttccgcgggcacaccctgcctttggcagaagcggcatccgggaacgaaatccgcaatagaggccacctgaccgggaatggtgggcagtttggttttccgcacggaacttagctgagggatggaggccagcagtcccttggtgtaagcatggcgggggttggcaaaaagttcccggacaggggccttttccaccacgcggccagcgtacatgacgactacggagtcacagctctgtgcgatgacgcccaggtcatgtgtaatgaggatggaggatgaccccatttccgcctgaaggtctttgagcagggacaggatttgagcctgaacggtgacatccagggccgtagtaggttcatccgcaatgatgagttccggatggcaggccagggcaatggctatgacgacgcgctggcgcatgccgccggagagctgatgaggaaattcgtccacacgctgttccggggcggggatacgaacgcgctgcaggagctggatggctgcgtcccgggcttccctggtgttcattccccggtggagcatcagggattccccaatttgcctgctgatgctgtgtacgggattgagcgccgtcattggttcctggaaaatgacgccgatatggcggccgcggatgccgtgcatgtccgtctcttttgcctgaaccaggtcgcggcccttgaacagaatttgcccgtccaaaattttccccatgggctggggcagcagccggacgatggacatggccgtaacgcttttgccgcagcctgattcccctacgatacctacgcaggtacctttggggacggtgaagctgacgccgtccaccgctttcaacaggccggattccgtttcgaagccggtgaccaggttcttgatttccaacaggggatcgctcatgtgttatttttccgtggcagaaggttccagagggtcgccgctttccgggatgacaggcacagacggcagcttgccgccgccatccttgttatccaggctttcaatggagtccatgtagcgatactggtcatacacggtatccacttcctcgaatgtttttccttcccgcttggcttccattgtttcctttttgatatcgttatccacccagtacagataactttccatgggatcaaatacgacgggatggcagaattgcgtagttgcactgttcggccatttgacccagcgccagtaacccagtctgatgaattccgtggtccagcagggaacccacagggcttcgtcatcaattttctgctgcactttccacgtggccttttggagttcgtcttccgtggctgcgtttgtttctgcgtccagcagcttgtccatttctttgttcgcgtaagcgcagatgttattggtataggtaataaggcctccacgctcatcataggcgtaccgggagtggaacccctgctcgttcatcggatgggggggagtgaatccccaggccatgaaggaggcctgagcgcgtttttccatgattttgcggaaagctacggtggagtccagagggtcaagctggatttccaggccgcacttgcgcgcgtcttccttcagcttgcccagagtggaagccagggaaggagatgaattggggaaggtgatggctgcggtgagccgggtgccgtccggcttgcggaggatgccgtccgggcaggggatggtgtagcccgccctggcgaaataagcgcgggcctgttccggggaataggggcgcgccttgatatagggattggtgaatttgccgaaacctgaattgtaggaattgagccgctggtagtctccgcggaaggtaatgtcaatgatattctggatattaagtgcgtgctggaacccccggcgaacattgaggtcattgaagggggctttggaggtattcagaaaaactccgtaaggagggcgggggtaaatggtgtaaaatgtgctgcggttgatgtagccgttgtgaacctccggtatttccatgcgttcgtgccatagttccggtttggtgatgttcaaaacgtccagttctccgatgcggaagagttcgatggccttggatggttccgcaatgaaattatacacgatttgatccacattatacatgtatttcgtgaattttttgtccctggcccaccagtccggcacgcgctggagcgttacttggcggccgcggatgataccgtccggcttgacaacataagcgcccgtagtgggcggtatgcgccactggtagcgttccacgtagttggggccgaactcgcaataaaaatgcggcggggacggaatgaacagcgtgcaatagtacgggagcagaggtttggcgaaggggagtgtgatggaaaagcggctgtcgtcgtagatggtgatgttggaagcgttctggtaaaaaaagttgttgtagaatacgtcccggctgtattccgaagtgcggatatacatgttcaccaggaggtcgatggcctttaccttggctccgtccgtatagcgggcatccggatccagttcgaagtaaacagtgcgcctgtctggggattccgcccatttatgagcgattcctggaatgatttttcccgtaaccggatggatggaaacgaggccgatgatgatttcatcatacagggggccgcggaaaccgctgttgctgttcgggccgttgggccggaatgtgtcgggataggatccgggggcccactggcgcagcacgcctccttttttggcattcgggtcccctatctccggattgtccagtccatcctcccacttcaggtcttgggggatgtccgccggggtcttgaatttgatgtagtcgccttccgtctgcctgcggtgaatgacggacagggcggcttcatccgcaatgagcttgctttgcagtttttccctgactttagaatcttcctctttaaaaaacttgtcccggatctcccgtatttccttttgcttggcagcttcctcacgagccaggcggtcattgatctgtttgttccatcgttccgggaaggaatcaaatcccggagggagcgtgccgaagggtacgttcggctgccagcctaccccctgggattgggaggaatccttgcaaccggacccggctgccagcagaagggacagcatcacggaagaaagggtggaacggaggagggtggacagcttaagcataagaaatggcaaagcgggagtctttttatttataagtggtaaattttttagggtcaaaggcttcgcggacagcctccccgataaaggtgacgagcaggagggtaatcaccagggcagaaaaggcggaggtaaccacccagctggcggaaagatccgccagtccgtcattgagcaggcgcccccagctggcgtatgtgtcaggaaggccgaagcccagatagtccagggaagccagagccagaatgagggcggaaacgctgaacggaaccagagtgaccagaatggcgaccaggttgggcaggatatgaacgaagagaatacggctggtggaagccccaagcacgcgggcggccgccacgtagtcgcgcgctttttccttcatggtggaggttctgagctggtaggtcatggacatccacccgaacatgatgagaaggctgataatcaggaacatgcctttcatgtgaaggggaaccatatctgaaataatcatgatgatgaaaaggaagggaacctgggagaagatttcaatgaggcgctgcatgccgaggtcaaacatgccgccgaagtatcccatcatcattccaaaggtgatgccgataaaatatacgataggcaggtagaagagtgcggctttcatatttacctggaggcctccgtacagataagccagaatgtccgccccctgggtattggtgccaagcaggtggccccccttgaggggcggggaggggtggtagaagatacggctgattttatgttcatccgtctgtttcaggaattcttccttggtgccggggccgctgtaatgttccgccacaatgttgttgttttcatacgtggcgctgtacacctccgttctgtcttccagccagccggtggcccggtccactttctttcccttgcggaatttgtagctgatgtggggaagggcttcttcatccttatgcaaacgggaggccaaaccggaatacggcttgccgccggcctcgcagacgagaccgtcttcattcaccatcaaagcttccgaaccggggttggtggaatctcccgtgggatcgtatggaaccagaggcatgatgacaagggagggttttcccggctggcctgcctgttttttcagttctcggtagttggcttccgcatccgcaaaatctccggtctggccaaatgtagaacccttgtatactttgcgcatcatggccggaaagtaccaggatccgtcctgaacgacaaggagggcccgcttgcccaccaggcattggtccatacaggccaatagcgtcaatacaagcaaaatgaggagggatacgtagccgcgggagatgcttttaaaacgctggatgcggcgcctggtgatcggcgttggatggaacctccgggggcctttcagcatgagccagaaaccgaggcctcccatgaccagcacgcaaacccagccgaaccacaggaatttcccctgaggcgtcagaaagccgccgttgttctggtccgtacagacgatgttgagcatgctcatttcccgtgagacggtgaagggccagcttaacgtgggcaggagcagcccgcacagctctcccacggcagtaagaaccgccagaatgatcaaaaggtatgccagttttctaaccatgtgtattattcaaatttgatgcgcggatccacagcggccacgatgatatcggagagaaggttgcccagcaccatcaggaaggaggtaagcagcagcgttcccatgatcagggcgtaatccttgtccatcagagcctggtaactcagcatcccgaacccctggatatcgaaaaccttttccaccagcatggagccggccacaatcaggctgatgaggctgcccagagtggaggcaatgggtataaaggagttgcggaaggcatgcttgatgacggcccctctgaaactcacgcccttggccatggctgtcctgatgtagtccgcggaaagattgtccatcaggttgtttttcatcatcatggtggtgatggcaaaggaacttactacataacaaatcagggggagcaccgtatggtgcagcaggtctccggcctgttgccagaaccccatgtccgcaaagtccggagacgtaagcccgcagagagggaaccattccagccgcgcgcccagatacaccaccagtacggcgcccagggcgaacccaggtacggagtaccccaggaaaatcaggacggaagagatgttgtccaccaggcttttatggcggattgcctttactaccccaaggggaatgcagacggaataggtaataatggcgctcaggatgccgaagtacagggaaacgggaatgcgctccttgatcatgtcccatacgggttcattgtacttaaacgagttgcccatagttccctggagcagcccgtcaaagctggtcttgtacattacggcacgccaggcatagccccgagccttgtcgcggacggcctccgtattatccgtctgcctcatgcggcgcgcccagcgttccgcgcggtccatgggggattctatatccacggtccagccttctgaagcggctttccgggacggcgtgccggaaaagaaagcatctttcacgctgccggaatccttgtcctggcgaactacgacgacttgttctcctgtttcattcagattgatccgtgtatgcgtatcggaaatgccggaatattcatcttccttgtctccctctcccgctccgccgatttccccgaattcctcacgggaaatgaaaatctttttgggcagcacgcccagccattgcagataagccgtgatgatgggctcctgcaggctgtactgctcttccagccgctccatatccgcttcactcaggttattgtcgccgcgctgggagccggctttctgtccggacagggcgctcatgctttgctgctgcatcatctgctcaatgggacctcccggaacaaaacgggttatgcaaaagacgagaaacgtaacccccaggagcgtcaagggcatgagaaggagtcgtctgatgatataggtcttcattcgtcgcgctgaactctaccgatttgtggaaggtgaggcaagtagcaatgcaaatttgtaagcctttgctaacataaggcgctgtccggttcttcttaagatgaaagggaaacaatgcaatacggcagggttcctttcttttggcaggcctttcaggaggtgcggactattacattccttctcccaaccggcgcgccagcatgtccggaagaccggcggccagaatgcgtctttgggcctccgctacatcgtattccacgcggcgctggtagtacaccatgctgtcttcgtcaagcacgccgtaggcggcgcggggatcgccgtctctgggctggcctacggagcccacattaatcagatatttgttgattttgagtagctggatatccccggattcatattcatggatgcttccttcatggcggatgaatgtacgggggacgtgagtgtgtccgttaaagcacaggaattgattgtcacgcagcatattaatgctgtgggtggccgtatccacattcgtgacgtaggcccaggagttgggcttgtcctgtgtagcgtgcaccagaacgatttcattggggagaatgcgctggaaaggagcgcggcgaagccactttttctgttcttcggaaagttgctgccgcgtccacatcagggcattgtaagctactgggttcatccctgccggattgtcttctccaatggcttcctcatcatggttgccgcgcacggtgggaatctggcggctgcggatgaattcaaggcattcggacggattggcgttatagcccacaacatcgcccaggcagtaaacggcattgcattgaagctgttctatatccttcatcaccgcttccagagcgggcagattggcatggatgtcactaatcagggctattctactcatggtattgtaagcaaagagcatagcactttggggaggttttgccaagcgcgtttgctcacaggaaatcatggttggggcacagggtgccggccttcccatgaccccttatttccgtctgtttgatttactcgtcttttgccggaggcaaagattccagggcttctctcagcccgtctaccggatatttcagggaattggccagatggctggtcatcaggtcacgggcgatctcatccgtgggaaacagttcccggaaggggatgcgttccttttccggtatgttcagcctgttttccagaacaaaaatattactcaccaggctgggtgtcctgttgcggggatccttgaataactcccggcccagttccagagcttctctggatttggaaggcacacggacgagcgcataaaattcttttcgggccgtaaggggaggcgctcccaaatcccgtgccttgcggtaggcttccgccgccttttcaaagtccggttgccggtaggtatcgctatacatgttgcccagcagggattgaaggtaccagctgtcaggattggcgttgatgcctttttccaggaagcggcgccccttttgaatgtatttgcggaagccttcccggcgttccatgggagaaagacgtttattgtccagataactggaggaagcgttattgcccaaatgccacgatccgttgtcccagtaaaaatcggagtgaggagcgagagaggtaacctggttgtagcggcgttccaggttggcccagtcggaaatcaggaaacaatcgaaagcttccatgctcagcacggccgccaccagggagcggagccctcccagggagaccatggcaagttgttgttccagataatcggaagaggaaagctctaccggattatccagcagcccctccaccttctcctgttccagaatatgattctgcaaaggcaggcgaatcatgccgaagcccagcagggcaatgatgaaaatgacgatggtcttcagcatgattcgcaattggttcgagttaattcatgttcaggcgcttgcggatggccttgtccagaagttcccattccggcacggaggctccggcttgccgggccttggagagagggtctccccagatagctgtgtattcgacggggcggccttcgttgtagtccacggcgctggacgggatgaaagcccccatggtttccgtacgggaaaggtggaattcaaccaaatcttccggcagggcgtagccgcgggccctggctgcctgtactacttcttccatgatgcggcgcgcgcgtacgacgttttccggattttggtagagttctgcaatgctgatgccgcccagagccaggcaaagcccgttaaacgggatgttccagacgagtttgtaccactggatttgctctgcggcgtcaaaggcgcgcgttttgatgccggcattggcaaacagctcggagagttccctggctttttcagtcccttccggcgtgggaatgaagggggcgaattggatgttgcccccttccagatggttgacatggcccggtttttcccgcatggcgcagatgaagcacaggcccacatagatacggtccgccgggatgatgcgggcaatttcctccgcatttcccatgccgttctggagtgtaaccacagttgtgtccggccccatcaacgggggaagggctctggaaaatccggcgtttgccgtgcttttccatgcaacgacaacgaggtctaccgggccgacttcctccgtgtcccggtaaacgttgatgcggggcagggagatattcccatgcaggcttttcacctgaaggccgtgttctttcagatagccgtattccgaacgtacgatgaaggatacgtcctgccccgattcctgaagtctggctccgtaatagcaacccagggctccggctcccagaatggcgattttcatggcgtgcggcgcggttggtgatatttttcagagcccctggacgttgcccttgttatccaggtagatgtgcatggcgttcggtgagacgggaagggcgggcatgcgcatgatttccccgcagagggccaccaggaagccggccccgttggcgatttcaaagtcgcgcacggtgatggtgaagccggtgggacgtcctcggaggcgtccgttgtcggaaagggagttctgggtttttgccatgcagatgggaaggtccgtcaggcggctggcttcaaactgggccagcttctttttggcggcggctgtcaattccacaccgtccgccccgtaaatgttgcgggcaatgatgttgagtttttcttccaccggcagggcggattcatagaggggcttgaaaggggcggaactcctgtccgcagcttccacaaccatttgggccaggtctttgcctccttctcctccctgggagaagatatccgcaatggcgcagggaataccgcgttccgcgcagtgtttcacgatagcgtccagttcttcccgggagtcgtcaaagaatttgttgacggcgaccacaacggggcgtttgtagtgggcggcagcgtccagatgtgcatccaggttggcaaggccttttttcagcgcatccacgtccgtgtttttcagatccgcaagggcagttcccccgtgcattttcagcgcgcgtgccgtagctacgatgacaatggccgccggatccagtccggactggcggcatttgatatccaggaatttctctgcacccaggtcaaacgcgaatccggcttccgtgacggcatagtccccaaaatgcagggccatcctggtggccagcacggagttgcagccgtgggcaatgttggcaaacgggccgccgtgcaggaaacagggcactccttccacggattggaccagattgggcatcagggcatctttcagcagggccatgacggaaccggtaatgcccagttcccttgcgaatacgggcttgtcatccgtcgtgaatccgatcacgatgcggttgatgcgttcttccatgtccttgtaggaagtggcaaggcacaggcacgccatgatttccgaagccggggtgatatcgaagcctgtttctcgggggaacccctgcttgttgagccccacgatgatggaacgcagggaacggtcgttcatgtccatgacccgcttccatatgactttgcgttcgtcaatgttcagcgtgtggaagaacatggcgttatcaatgatggcgctgatgaggttgtgggcggatgtaatggcgtggaagtcccctgtgaaatgcatgttgatttcctctgccggcgtcagggagcttttgccgcctccggtagctccgcccttgcggccgaacaccggtcccatggaaggttgccggagcgccaggcagacttttttgccgatggcctgcaatccctgcgccaagccgatggaaacggtggttttgccttctcctgatggggtgggagtgatggcggataccaggatgagtttgccgggggctgccggcctgtccaatacgtccagggaaattttggccttgttgcggccgaaggggatgacgtctttttcatcgacgcccagcttgttgatacagtcggagaatgcaggtgtagccatgcgcacatgatgacggaagccccctcttttggcaagaaggttcatgggcattccgggccggatgaatcaatgagcgggaaagggtcgccttcttcctgttccgcggcattctccggatatctatgcaactccgtccccctggaaatacccggtatggcaggttgcgctaagacgggggtaagaatcagggttgctctttctgtttcccctcaaccagcacgggacgatagtggcctgtgatggtgtgggaaaacaggaaatcttcttcctgcgttccggcgccgacattatgaatgatcagcggcgtgccttcctccgttttccggtcggaaacgatgccaatgtggggaatactatcggacaggttccatgtaaccaggtcgccgggcttgtagtccgccgcgttttccgtaatgggaacggaccaaccttttctggcaaaaaaggtacgaagattagggaccctgcggtggtcaatgctgcggtccgtcgttttcaatccccatattttagggtatttggaaaagtgggccttcatgtcctcatgcacggctttttgaaggtccaggccgaaggccctcatggcgcggatgaccacatccgtgcatactcccgtttcgcggggaacgtctccgttggggtagggaatggattgatagcctccgttgtaggaaaccgttactcctacctgttcacgcgccctggccgccagtgcggcgttgtccgccatcaggcatgtagggcaggaaagaaacaggaggatgagaagggccgccggtttcataggggagatggggagggaaaagcgggaaaatcagacgaaactggcaaagccgatgtccggccggcgctgcatgccgttaaattgaatctttttgatttcgttgtgggcgcgctggcgcgcttcggagagggtatccccctgtgccacgacggccaggacgcggccgccattggtttcataacagtttttatccgcattccatttggtgccggcgtggtaaacggaagcatttgaaatatcgtccagtccctgaatagcgtcgccggaatgggaggtctccggatatcctttggaggccagcacgcagcagacgcaccagccgttttggaaggaaatttcttccggcgcaaattctcccttggccccatgcaggcagaaggaggccaagtctccggagagcaggggcataacggcctggcattccggatcgccgaagcggcagttgtattcaattacttttgggccgtttggagtcagcatcaggccgaagtacagaaaaccccggtagggcagtccgtcttttttcagtccggctaccgtcggagccacgatttccttttcaatgcgttccagcatttccggttccaccagccggcgggaagccaccgctcccatgccgcccgtgttggggccagcatcgccttccttgaggcgcttgtagtcccgtgccgggcagaggatgagataatggtcgtccaccagagcgccgaagatggagacttccggtccggtaagaaattcttccaccagcagccgtccttcaccaaagcgcctgtccgtaaatacttctttcaggaaagagtccgcttcctccttgctcatgcagacggctacgccctttccggcggccagaccgtcaaatttcagtacggtaggatagttgtttccgatgaattgccgggcttcctccaatgtggccgctacgcgggcctgcccggtagggatgcggtggcggagcaggaagtccttggcaaattccttgctggcttccagctgggcgctttcttttaccggtccccagcaggggatgcccgcacgggtgcaggcattggccaggccttcatccttgaccagatagctctcctccccggcaacgcagagatccattttattggaaaccatccagtcgatcagcgaggggagatccctggccgggatgggggtagccagacggttgatggcgtcactccccgggaaacagtacatttccggagcggagggagattccttgagtgccttgaccagtgcatgttcacgtccaccttttccaataacggctattttcatacgccgccagtatgccgggacggactgattttgccaagctgaaatgaacggtgaggttttcccttttgtccggttgttcccgtactttttctccattgccgggaatggggctgtaccactttttcttttcgtggcacggcgctgccgttccgttcggggaagatgatgtaaaaagaccgcctgacccggaggaaaggcggcctgtaaaaggaaaaggcggtatttgcgtttagaacgggatttcgtcgtccatgtctccgaagtcgttggacggctgattggtggagggcatggggggcgggttgtagttctgggccgggcgggattgtccgtagttgttggaacggggagcgttctggtactgctggcgcggagcacctcccatatcgccttcaccgccgcgggggaagagctggatgttttccccaatcacgcgcagcttggtgcgtttctgcccggaagctttatcttcccaggaatccagttgaaggcggccttccacaaagactccgcggcccttgctgaggtagttgccggcaacttccgcctggcgattccaaagggtgacgtccacgaaagtggtttcttcctggcgttcgctgttgtcgcctgcgtagtaacggttgatggcaaggcggatgtccgtaacggcggttcctttgggagtgtagcgcagttcgggatcagcggtaaggttgcccattaagaagactttgttgagattggccatataggatgggtgttaacgaggtgtatggtatataggaaaagggccttgccgtttaggaggaaggcatgtgtttggtcgctagcaagtatgggcctgcacatggtcttgtgcaatactaaattacggaatcgtccttcatcatgtctcctttctacattgcattcgtcatggaaccgtgaaaactttacctccatgagtttcaggcagcggcggagaaacggactgttccgggtttcctggggcacatgccttttgctgtctgtgctggcacacctgtttttgctggcggggatctgcctggttcctgaagaatggctggcttccccacgtccggctgaagcggcgcggaggaaagtggctgtaagcgcgcgcatggtaaagaaagtggaacctcaactggagggccggagacaagagccctcggaatatctgcctgccgttgtgaagaccaatgaggagcaggaaagcgccaccaggccggaagtgcccaaattccagagcaacaggaatacgcgggcggaaggcggccggaaggatccggacggcgacagggatatgcccgcccaggatggcgtggaacgggaaaacggagagattgtcctttttaaccaggaaaggcaggatggggatttaagccatgaacgagacggcaacaaaaatgcctcccccggagcttcttccaatgttccctaccagcccctggaaccatccatgccgcctgccggtcatcccggttccctggctcattctcccgtcaagaagggagagccaggcaaatcggaagaggaaaaaacggcccgacaaaacatccgtcatgcacaggagaaggccatgcagcttccccatgcggtagtgttgcccagccccggagattcggagaagccggatccgcttgaggaattggccaaaagcattgcgaaaggggcggacaatcctcccctaaatcttcccaatctggatttggtgcccaatacaaaaccggttcagaaacagcccttgtatgatcccatgttcaatgcggagagccagcccggcttcaagacacatgagcggaagaccaagcaggtcggcaaattcagctttggccgccgtccgacattggatgtggaagctacgcccatgggaacgtaccaggcgatcgtttaccgggctatcggggaacaatggtaccgccagtgcgatttgaaccgcgacctgattgttaccggaactgtgcgcatccgcatcctgattaacaagaatggcaaaatttcgtctatgaggcagacttcccgcgtgggagccagcgaggtacagaagtcctttaccttcctcgccatcaaactcgccaggcttccagcgatgcccccggaggtaaggagtatgcttgtgggggattctttggaaatgtatttcgatttcaatttttaacaacctaccatcctgcaacaaataccattcacagatatatgatgatgaacttgatcaaagactgcattacattcttccaggcaggcggcgttttcatgtacccgctggcagcctgttccgttcttctgattgcggccgttatttaccgcatgttcaatatgaagaagagcctcatttgccccgccgtgctgaccagggccgtggagcagtacacccgcggcgccgtggggcgcactgaattggagagaatagctgaggattcggattccgtagagggccgcctggtgctggatgcgttgaattcaccgctggaggatgaagcctccttgaaggaaatgatccaggtgaaggcccgcgaggagtttgtaacgcttcaggcgggtctgcccctgctggacatgattgtgatgatcgcacccatgttcggcattctgggaaccgccagcggcctggtgcagattttcagcgttttcggaatggatgagagtcacggcatgattgctcaggggattgctcaggctctgaatacgacgattgccggtctcgccatcgccactccggctgtgattgctcacgtttattattcccgcaagctggagcgtatttccgcctccatggaagtcctgctgacagaattgatttccttccgctgccatcattcccaacgctgacaaggccatgcagttttaccgcaagaaagcaaagagcatgggggtgcccatcgtccccatgattgacatattgaccattctgctgatttttttcattgtccatacgcagtggaagaagccgcagtccctgcttaagatagatgtacccggagcggaattcatggaggggacgccgtcttcggaacagcgggccgttctggccgtgacggggacatccgccatttccctgaatggcaggctggtggagatgaataaactggctgctgccctggaagccttgaaaaaggaaaatccaggcgtcaaactgcagcttgatgtggataaaaaagcggagtttggcatcattgtcggcatttgggatgcgctgacgtctgtgggtattgacgcaggtgaggttcctgccagaatagaaatcaacaagcccggcgcacggtaagcgccttaacatatatattatccccctcccgatgttattggaaatagcacagtatggaaatccggtattgaaggaaaaatgccgccctgtagaacattttgacgacagcctgaaaaccctggcggaaaatatgctggaaaccatgtatgcagcagagggcattggcctggcggctccccaggtgagcattcccattcaactggtagtgattgatattccgaaggaggaagagtccgtcacctggcttaaagtgaacggagaggacaaggagctttccgacatcatgcccttgatgtttgccaatcccgttctggaaccttacggccccatgcatccttttcatgaaggttgcctgagcgtgatgaaaatacgtgcttccgtcgtgaggccggattttgtcaaggctacggtgcttctgattgacggaagagaaataacgattgactgcaacggccttctggccagatgcctgcaacatgaatgcgaccatttgaacggcatcctttttgtggagcgcgtttcttccgcacagaagattaccctgcgcaacaaattgaagcgtctggcattgggatattagctttccgtgacatccctcaggccctttatggcagccaaaggaggggggcaaagaagaccgcattccggaaccgcaaagtttttacagccgggaaccgtcccgtgatgttcccggcggactataatccacccgggttcgcagtattcggaagagaagaggtcaggacgctttttccggatccggctgaaccggttttccggattcccttttgacgcgtatttgcaaatccgccaaagcgttcatgtagtaaatgtacgcgtcaaaggcggatgcatacggcgtgaaggagttttccttctgcatgtagtggaagtggtccgcgctctgcagtttgcgccaaacgtgggtgagatccttgtcatgggctgccttgaccggtttttccagacggtagattttgcggagggcttcatcctgcatgacgttgccattccaatgggacatggttccaaaagtggagcaggtcatttcctgggtgcactcacagacggaaacgggcttgatttcccgcgctacttcggacggagtcatgaaccggttgccggcatctatgcaggcgagaatcatcgtacgccagaatccgaagacgcctgtagcgtcagactgtcgttcccccagcgtttcatagtccatggacagggtagtgacgcttccctgctggtgcgtcagccaatccgcgaaagtggtgggggaaagcgggtattccgaccattccggatcagtccgcatgattgccaggtcattggagagttcccggttgcggaagatagtggtggtgttatacacccacggagccaggaagacttcattgctggtaaatcccttgagcatggccgggttgccgtccgccatgatgcccttgaagccgagcgtttccgcctgcgccgcaatggcgttggagtacagcatgccggtattcatcagcacatccgtttcctgatgaaagagttttttgagaagctcccggtgttcttcaatctgttcggcaaattcctgaggggagtaaacggatgccagggaattgtaataaggcattgccagaaagtccacacagccggtttccgccagatccttgaatgcggcaatcaggtccggcctgtggtacagggcctgttccagaatgactccgctgagtgccagcccaaagcggaatttgcccccggtgagttcaataagctgtttcatcagccgggttgccgggaaataacagcgctccgccaccgtgctaagcacgcgggcattcagatcatcatcttcataaaaggcatgttctccaattttgaagaagtcataatgaatcagccggttgggctgatgcgcaacgaaagtgagggaaatgttgctcatggacggggtgaagaaggctgagagttatggagtagggtaaaaaggcgtttttagcggttcagcacatgtttatagacccggataaccttgtctgcggcggcatcccaggtggaggccttgatgtcctccgtgctctgttccactactttccggtacaattcctcatccgtgcagagatggacgatatgttccgccatcttgttgacgtcccagaaatccgctttcagggctcccttcataacttccgccacgccggactgcttggaaatcacggcgggaatgttgaattgggccgcctccagcgcagaaaggccgaagggctccgatacggaaggcatgcagtagatgtccgtgatggagaggagttcattgactttgtccttgttcaggaagccggtgaagtggaatttgtcgcccacgcccttgaaggctccggattcgatcaactggcggagtttttctcccgtaccggccatgacgaagcgtacgtcgtccgtctgttccagaaccttggcggcaatctgaaggaagaatcccggacctttctgagccgtcaggcggcccaggaagagtacgagtttttccgggaattttttcttccctttaaagactttgaccggatccgctccgttatgaatgggaaatatcttatgggggtcgatggcatagtgcccgctggcgatggttcccgtgtatttactgaccgggataacggcatccgcctgttccatgccgaatttttcaatgtcgtaaatccagccgcgggcatccgctccggcacggtcaaactgggaagcgtgcagatgcaccaccaggggcttgcccgtggcttttttcacttccacgccagccagataggtcatccagtcatgggcgtggataatgtcaaaatcctgctgaagggcgacttttaccgctatttttgagaattgaatgactttcagggccaggtctccggcgtaaaggtcttccttgttcctgaacagctgaaggtcggcttcatgtgttttggagaaggtgatgcggccttccttggtgaactgcaccacgccggattctccttccacggtggtgtaggggtccagttcaatgggcgcgcgctccactagggcaaagctgtcataggaatatttccggtccacttgctccacttcccgataggagacgttattgagaccggtgagctggaatccgtcaaaaaggacggaagggtcggccttgggaacgatcacccttaaatccactttttttgccagcgccttggaaagacccaggcaggcaatgcccagccccccgttgaccaggggcgggaattcccatcctaatgtaagaactcgaattgtgctcatcggttgatgtggtttgtcggtgccgggaaggatacggactcgtgccgtgttgtacaccaacgcaataaaaccagatttttcatgttcggtctagattaatatgaataattttactctaataatgaaaagaaaagtgctgctttagttcaatcttgcgttcgtcatgaaattgatttagtctggactgaacgcttttgatcctctcttccgtccggcttcaatgtgctccgttttcaacatccctgaaagacgaaaaacacctcctctccgggggagtttcgtcaaatgggagtacacgaatacggtttccaaaataactctcagcgtgtgtcttgctgatgccggtattgtccgcgtaacgtatttccccggagcggtgccggaagacgagccgagttatgccgtaagccccggatattccgcgccgggagcggaaatccgcgagtatgatgaggccggggttcatgtcgttgagacatccctgctccgcatccgcattcgcacggaggagcaaaaggtggatttttacgatgttgccacggatgagcccctgctgacggatgagggcggattcggccgggagagcaaggactggactggagacgcccgggtatggatacggaaaaatcttcaggaaacggagcattttttcgggcttggggacaagccgtgcgccttgaacctgaggggcaagtatttctccatgtggggagcggaccattatgatttccatgaggagtcggatcccctttacaaaagtattccctttttcctcagtttgcgggaaaggaaggcgtacggcctattgtttgacaacacgtgccgttcgtatttcgacttcggagctacggatgaaaaggttctttccttcgggtccttcgggggcctgatgaattattatttcatttacgacaacactcctctggacatcatctccgcttatacgcgccttaccggtacgcctgaattgccgcctttgtgggcgctggggtaccaccagtccaagtggagctattatccggacaaggccgtatacaatctggtggagcgtttccggggcctgggcattccgtgcgatgccgtgcatctggaccatcattacatggaacggaaggagggatttacctgggacaaacagaattttcccgacgcggaaggaatggtccgcgccctggagaaggacggtgtgaagacggttctgattgtcaatcccggcgtgaaggtcaattccgccaatccggtctggaaagaggggatggaacgcaattatttctgccgccggtcggaaggcaatttattgtcggaagaagtatggccgggactttgcaattttccggattttacggctcccgccgtacgcggctggtgggcggatctgttcagcagggatattgggaaaattggcgtgcgcggcctctggaacgacatgaacgaacctgtcgtttttccggaccgcactttcccgatggatacgcggcatgaatatgacggcatgccctgttcccatgaaaaggcccataatgtttacgggcagtgcatggcggaagcctcctggctgggcatgaagcgtcacgctccggaccggcgccccttcctgctgtcccgatccggttttgccggattgcagcgctttgccgccacatggacaggggacaaccggtccagctgggaacatttgaagctggccaatttccagtgccagcggcttgcggcttccggcatttcctttgcgggagcggatgctgggggattcatggggcatcccacgccggaattgttttgccgctggatgcaaatggcttctttccacggttttttccgcaatcattcctccggggagttcggcggtcaggagccatgggtttttgggcaggaagtcacctcttacgtgaaagccgccatagagggccgctaccgcctgcttccctatatctacacgcagttccgccggtacgcggagacgggcatgcccgtgctgcgctccctggccctgcaatgttttaccaacaaggacacctactggcggggggcggagtatttctttggagaccatctgtacgtcattcccattcatgagccgcaggaaggcgggcggttcctctacattccggagggcgtctggtattcctaccacacggacagcctgatggaggacacaggaaaggatgtatgggtgaagtgccccctttctttcctgcccgtgtatgtccgcggaggggcggtaattccccattggccggtgcagcaatacgtgggagaactgcctcggccgccgctgacgctggatgtatggtgggcgccggaaggggaggtggcttcccatttgtatgaagatgcaggggacggatatgcataccggaacggagaatgcgccgtgcatgggttcctttaccgcggcggctccaattccctggagctggattggaactgcgaaggggatccctgtgcgttccatgagtccgcagaggtggttttgcacggtttgcctgcgggtatttccgtcagtgcatgcatggacggcgtgccgtgctgcggcgtgatgagggaaggaagggtgtggaaaataccggtgaaggataaatttgacacgctttccgtctgctggccggaggaataatgttcttccattaagggaatgaggcgtccggaggaactgtcatggaaggtggaaactgcgcctgaccgtatccctcttcagtttcagttcccgccattcatgcgtcagggtggaggaggccactacgccgcccccggtgcagagtgcgagcctctgcccctgccagtacagggagcggatgcctaccaggcagaaaaagtctccattttccagaaaaccgaacggggcgccgaagtgaagcggacagcggagacgtgaacgccagtcgtccagctgggagagcgtgttttccgtgcggggctgggaacccagggcgggggtggggtggagcagccgtatccagtgggccggagtatgctggtcatcagattccagtgtgaggtaagtgacgaagtggatcagggtgcccaggttcagcacgctgcgtgccgttctggtgacgctgccgcagggggacaggcgggaaagaatgctgcccgccacgatttcatgctcgcggatttccttgtcgtcgttgatgaaaaccccttcatcctccggacgggccgttcctgccagggccattgtctccaggcggcagccctgctggtggaacagtgtttccggagtgattccgcagaatccttcccgttccgtccaccaggcgtagggataatgggacggagagctgctgatggcccgcaggatgagttcccggggggtgtgggggagcagcatttccccgaactgggggatcgccggaacgcttttcatcaattgcccggcagcgatttgctccatcatttccgcaaaaacctgcgcgtatgcgtccggagacggttccgcccaccggatttccggagcaggcgggggggatttccctccgccgggagagcatgaagggctgccggtattttccatggccgcgggtcgtccagccggaatgtatcaatataaaaggcggggccggaatccggcggttccgctgattcccggaaaggcccggttccgagaagaaggccgcgggaagggtgcttgatcagggctccggaagtcagcgtttttatgtccatacgcaattcatgttaaaatgccgccgccgggaattccagctatttgaatgtttgtgaagtgcggaagaaacgggaatgacggttcagtgggcgcctccgtttttccagaatgtcccatggatggcatggacctgaaaaagggcattccccttcgtccctgacgctttttcctcctccgttgaaaaagcaggggatgacggcctttccctgcccggagcctgtaacggagaggaactccgcccctgtttcctggagccgtgcgccatgtcacgtgcgttccccttttgaattgacggggaaaagcactcaagtaagctctaaagagcttccgaccctatgcagataatgaacagaccagcaccatcagtccccaccgccgatattccggtagaggccatgctggcagaggtgcggaagccgctgggacccgtttggtggagcgtgtttctcgccagcgcattgctggcggcgtggggcatagggtggagttcctggcgtattgccgcagagggtgtgggcgtgctgggggtgaataataatgtggtgtgggggctggacatcgtgcattttgttttctggataggcctggggcatgcgggcaccctgatttccgccgtcctgctgctgacgtgccagtcatggagaagcccgattgcgcgcggagcggaacagatgaccctgtgcgcggttatctgcgccgccgttttccctgtggtgcacgtagggcgtgtctggatggcgtggatggcttccccgttgccggaagtgagcggaatttggccggacatggcctctcctttgatgtgggatgtcatggcagtcagcacctattttcttctttccctgttgtactggtatatcggcctggtgccggatttcgcgttgctgagggattgctgcaaggggcgtctgaggcgccggtacgggtggctggcactgggctggcaggggacggggcgccagtggcgcgcctatgaaaaggccagccttctttttgcggttattctgactcctctcgtggtatccgttcattccgtggtgagtttcgatttttccgtgactcaggtgccggggtggcaccagagcattttcccgccctatttcgtagggggggccatcctcagcggcatggcgatggttcagctgattctgctgggggtgaggcgtctgatggccggcagcggcgttcgccgggccgttactccggccattctggatttaagttcccggtttgtgctggccctgagcctggtgatgggagccatgtatttgtgggagcatctggcagccattctgaatggaggctctccggagccgtttccgggcagaaatcctgtgaatgccgtgttcctcatcgtcatggttgccgggaatgtggcgctgccccagttgttctggttccgctctctgcgaaccaaccgctgggtgatcgccgccgtggctctgggagtgcttgcgggcatgtggatggaacgtttctggattgtcgtgaattccctgaaggcatccctgctggctgccaacatcggagattatttccccagcgtgacggatttggccatgatggccgggagcgtggggctgtttatggccctgtacatggcgctggtgcgtgtggctccattcttctccctgtgcgacgtgcgggaacagcaatccctgaacaaggagggcggggcatgaaaaagcccgtcatttccggctgggtgctttccttcggttcggagaaggcgctccttcaggccgtccgcgtgctggtgaaggaggaaaatctgcgctgggaggtttgcgcaccttatccctgcgccgctgttcgtcttgccaacaggcacgccgggaaggccgtgggagcaggcgtccggctgtgggccgcagcgggcggcgtctgcgggtttctggccgtggctctgtggctttactggacgcagttctgtgcggatccccttgtgacccagggcagggtccagggctgggacagctggcccgcatatgtccctcccctgtttgaaggaactttgctgggggccggattgctgaccgccgccggtttcctgaagggggctcttctcccgcagtggcacgactgggcgttcgagtgtgattttttcaggacggatgagcacgggaacggttacttcattctgctggaaggcgggagcgaaggccatgccgccgttttggctgaagccctgcatccggatgcccgcgagtacgttcatgggaaaggaggccgggcatgagaggaggcatcacggcggtagcagcccttgttctcctgggagcgctctggttcctggcaggggacgacgatggaagaaatgccgttccccgtttgtttgacaatatgaatgatcgtcctctggcggatgcccagcaggtggggatttcttccgccgccccggaccggaaaacgcgtttggcgcctccccgctccgtggcgcagtccctgggcatgaacggaacggtccgaaaacgggaggatgaccgggactcctttgctgcggaaggttcctatttttcctccggccgcatgcagggcggagaggaggattccatgcctctggaactgggcggcatctcccgcagccgcgacgtgctggcggaggggcgcgcgctttatctggcgcattgcgccgtttgccacggagaggacggaagcggacgcggaagcatggccgcttatgacacctatccgcaaataggccccttccgggatgaaaaatatgcttcctattcttccggaaaaatgttcaggagcattcggttggggcagggaaacatgcccgctttcggaaacattctcacggcgcgggaaatctggtgtctggtggcgtttatccgccatttgcaagcgccgccggaagaacctgccgttcaacagaaggaacaacattcatgaacagcaatacatctttaacaggcggggaacgccaggaccgtccgggattcggctgggccgggcgttccgctgccctttccctgtggatcatttccgttctattatggtgtgtgctgatgcgccagtcctttacggccatgccctgggacgacatgacggtagccggagaaaggttgcaggaattgagagggccgttcgccgctgccggaatggccgtaggagtccttggctccagtctctgtctggggtgcctgttctggctctgcctgtcttcactgacaggttccggctggggcattgcgctgagaagggtgctggcggcgggttgctggggttttttacccggtgttttggtattggccggaacggtcggctgcctgactaccgtgatttttccggaagcagcccggtactggggagtggcggatgttgcctctcccggcgtccagcccttcggcgttctggatttggctgacttctcatggtggaacccggcatggctgtacgtgcgcgtggggagtattgcggcgctttcctggagcatggcccaggtatgggaaacgctggttgcggaaaaaaatgtctggacgccttccttccgccggggctctgccgccgtctgcatggtcatgacggtgatgatgctgggcctgctggggatggacatgctgggagggacgggaaaggtcgttctttccatgttccccgtatacatgattgcatatgttctgctggcgtccctggcattcgctgtgttgtctgccgtgttcctgaggcggctggacggagggaaggagctgccttggccccgcctgggcggcatgctgatggccatggttctggtgaaagcctatattgtgtattctcagtacatgattacctggtacgcctccattccggctgaaatgtccttttataacgcagccgcttcctccggctggtccggaatgtttgccgcggctcttgttcttcagcttctgctgcctttccttattttgctattccccgcgttgagacgtcggccgtccgctttgggcgctgtatgcgccggggtgctgtttggctccctgctggaagcatgctggatgttcggccccggccttgggctggacccgtccgcatggaaggcatggcttccgcttgtcctgctcttgggagggatggccctgatctgctgtttttccttcctgggggcgctgagcgtccgcagggtatttcccgaatcatgatgaaccgtaccgccgccgttttttttctgttttcccgccgtccaggcgagtatctccccctgttctggctggcaggggctttcgtgctgggtttcctgtggtcgctggcgtacgcttccggtctggtggcggaggagcctttgccgtggccggccggccgcctcatgttcgcattctacggcatgctggtatacggctgggccctccccgtcctgttttcctttgcggcgggaagcaggagccggtggatgaaacccgcagaatggctctggcatgcctgcgttgcgctggggttggcgactattgccgcagggaatgggtgcggcgtgctcctgatgccttttgactggtgggtttgcccggtttttgccttccttgccgcaggggcggcgtgcgtcgcatggttccgcccgtttccgtggcctgtacggctgttgttcagttcctccgccgggtgtgtggccgcggccctttgggcgttgggatatacgcaggcattgtccatgaatggcctgctggatgtttccgccctgggaggaagcctgtcctgcgggctgatgtttgccgccctgggagcggcggcgctccgcctggatatggcgcaggggagggctgccggaattctgtccgtctggatggccctggtgctggcggcggctccggtgattggcgggctgggggggcttcaggggtttcccgtgccgtggatgttggtggaggccggtaccgtctggttttggtgcgccgttcttcccgccgtcctggcggtggcgcgtttttggataaaatccggtacgaagactggaatatgggtgaagaccggagtttccctgcttgccttgctggcggcatggaacgtgtttgttgtgggtgcgcctgagctgatgcagttttccctgtctgcgtggcatgaaccggaattatggattctgctgggggccggagttttgatgatggcaggggggaaggcccccggacgtttccctgtggcatggaggttgttgggcgcaggcgtctgcggcgtgcttctggcgtatgccgtgggcgtgcttgctgccctggatgtccaggcttttcctgaggcccgtcgcgcggagctgatgagcggctgggtgggcatggctgcctgcgtccacgccgttgccatggctttttgcctggcgggaagcctctgcctgtggcggccagcgggagtggaagatggaggccgggagccttcccctccgtttttgcggcgtttcttcttcatttcagccgtagcggcggctttggcgctggcgacggctgcggccgtttttttgcatgctccgcctccggattccatggaggtcaggagacccgttcatgatgcggaaggttccggtatttatgccgcggaggggtgtgccctgtgccatacccagattatccggcgttccctgtccggaaaggactggcagacggcgattgaccgcgggacggatcctgatttcccctaccgggtcagtgaaccggaagacatggatgccgaattcaacagggaaggagcgccgcaggcgggcgtggcagccataggcccggacctgagcaatgcggcggaatacgccgccgggaggctggaatatgaagacgccgtatccggcggcacgtgccgcgccgcgcaggcgcgggaatggctggccctgcatctttacaacccgcgggaaatgcagttcaacaagccctggactgtatgtccgtccatgcccggactgtttgaggaacgcacggtggaagggaacgccccctccacggctgccctgcctgtccggatggaacggggccgggagctggtgccttccccgcgcggggagcgcctgttgaactacctggagtccctgcggagggaggaaccctccctgaagcgcgaccaaatccattcctttccggccctgtcccacattcacccggattatgccgcgcatcctcccgccgtggacatggaacgcctgaagaaggcccgcgccgccgccgtgatggaaaagggcaggggcgtgtacctttccaaatgcgccatctgccacggcaacgacggcatgggggacaaggtgacctatccgcccctggccggatccgaatggctgaaggaaaagcctgatgcggaaatcgtcaagatcatcctccagggactgaccggacccatcacggtgaatggaaaggaatgggattccaccatgctgccgcccggcgtcacggactcccgcgacctggcgaacctgctcacattcctgcgccgccagttcggcggggtggagaaggcggcctatacgccggagcaggtggacgccatccgccgggagctgtgacgggagggcccccgattacaacgtttcatgctcctgaacggaaatggctgcaaatgccattctatgaatttagatgatacgtccgccctttctgcggacagaaacgttgtaatcggaacaaatgccagtgccgccaatggcacggacaatgttgtgataggttaccttttccaccagagacgaccggggtaccgttgcgggttccacgtccgtgggcaccaactccgccggagtcgccctaggggatcatattaaagtagggaattcctgcgtttccgtaggttcctggtccaatacggaccactgttacatggggatagccctgggttatcagagtaatacgtccaatgaaccggagaagatccatacggccacggcttattccttctgcgcgggcatgggttcccggatcaagggggccttctgcataggcatcggcagggggatttatgtggaagacggctaccggacaatcctccggcccccggttccggcttcagagggataacactggcctacaatgccatcacgaaagaggaagttgtggaaatctaaaagggcttgcctagtcagcatcatctccccgctggtgacgcccggattgacgaaccacaccgggtggccgtcgcgtggccgccggaaatcatgatgctgttccgggtcaatgtcctttgccagcaaatccagcgggtataattccagtttggtgccgggggtgctgaaaaataccacgtcgggattgtccccggtctcgtccgttttaaaaccaagcttatcccggtaaaattgcagggactttttcatgtctatgaccccaaggcagatgacggttactctgttcatgttcttcttcatggaattggcgaatagcctgttttctgtttaatgttttgcggcgcctccgccaggaaaatgtgttcttcccggttttgctaacgtctggttttacggtgaaagaaacagagccgtccgcaggtagttaaggaaccttttcatgaatcttccttcctcccgcatttcctggctggacaacatccgtatttttgcctgtattctcgttattgccagccacatcgtagggcagttttttgtgtcgcctccttttactccggacaatgaaacctttgcctggtcctccttttatacggtgctggtgcgggtctccatccccctgtttttcatgatttccggcgccctcctgctgcccgttcgggatacgacggggcaattcctaaaaaaacgcttcacccgcgtcctgttccccttcctgctgtggtctgcgttttacactgtttttccgtggagctatgaaacgctcacgggggacagttttcactccgtcttccccctctcacgggtcacgccggacctggaaaccatgggaacgaacctgctgctgattccactgaaattcagcgtaggcattcatctctggtacctttacgtgctgatgggcctttacctcttcctgccagtcatctccccctgggtggagaaagcgggaaaggcggcctttgcctacttcctgctgctgtggacgctcaccctcttgtttccttatttccagaccattttccccagctatctgggaaaatgcccctggaatgaatacggggccctgcattccttctccgggtacctgggctacatggtgctcggctgctttctgaggaaatactctgggaatgcttccttcgcccgcacggcctgctgggccgttccgtgtctggccgcggccttttggttcaccctccatttctaccggacgtccacggcgcaggcccggtcctcaagcggcgactacatcggcttcgccagcattaatgtggccctcatgtccgtggccgtcttcgttcttttccagtcacttcccgcgttcagagccgggtccgcgccgcagcggctcctggctgatttctccagcatgagtttcggcatctacctggtccactttgtgctggtgggagccgtttaccgcctctttggcatgctccatctgttgttccttccggcctctctttccatcccgctgctgactgcggcgacgtgcctggcagcctggggaatcatcaagctgctctccttcctccccggcagcaggtacctgatcggataaattccggcatggagacaaaaaactgccctccgcaccgtgtggcgggagggcagtccggatggaaaaagcgggaaaaacaggggtcagctcagggtttccaccagcttgtccccataggcggagcaggtaagttccgtggaaccggaaatcatttccgcaaggtcgaacgtaaccgttttttcggaaatcacccggtcaatggcctggatcagcaggtcggcggcttccgtccagcccatgtagcgcaacatcatctccgcagacaggatgacggagctggggttggccttgttcagtccggccagtttcggcccggtgccgtgcgtagcttcaaaaatggaatgccccgtcaggtagttgatgttgcctcctggggcgattccgatgccgccgacctgcgccgccagggcgtcggagatgtaatccccgttcagattcagcgtggctaccacgtcgaagttttccggatggagaagaatttcctgaaggaaggcgtctgcaatgcaatccttgatcacgattccgttgggaagcttcagccaggggccgtcccctatggggagggcgccgtattcccgccgtgcgacatcatatccccagtcacggaagccgccttccgtgaatttcatgatgttgcccttatgaaccagcgtgacgcttttccttccgtttttcacggcatagtcaatggcggagcgcaccaggcgctccgtgccttcacgggaaacgggcttgatgccgaagccggagctttccgggaaacgcacctttttcatgcggtccgggaaaatgcggctcatggtatcaaaaaacagtttggcatcctccgtgccttccttgaattcgattccggcgtagatgtcttccgtgttttcgcggaaaacgaccatgtccactttttccggagctttgacgggagtttcaatgccgttgaaatagcgcacgggacgcaggcagacaaacagatccagatcctgccgcagcgtgacgttcaggctgcggatgcctccgcccaccggagtggtgagggggcctttgatgccgatgaggtacgtgcggaaagcttccaccgtttcattcggaagccaggtgcccaggttgtcaaaagatttctgcccggcaaaaacttcataccatgcgatggaacgcctgccctgataagccttggctacggctgcgtcaatgacacgggaggccgccgcccatatctcaggaccggttccatcaccgatgataaaaggaatgacgggcctgtccggaacgcaaagcctgccgttctgcatggtgacggctgcaccgtccgcgggaggggtgaatgttaaattggccatgacgtgcgttcctttataggacgcagaccggtttggcaagataaaagagcggaatggggaactgtgcttcgtggagctttgccggctcctgaagcaaccggacttggaaatgttttcctcctaccccatgcgcatgtctcagaaccagcggtccttcccggaagggtcttccggctgaccggcttcttcccggaggcgtttgaggaaattttcttcagcctgatgtttcaagccgctctccatgatatgcttccgggcgttttcgttcagctggttgacggcaatggcggcatcttcggaagtcagcctgttccagatgccggcgtcatccttcacgattcgcagggacccctccaccatctcacaggaaatcagcttgccatgaaggccctctgccgtaatggggcctttgtttcctgcgggaatgataatccgaagaggttcgggcccttccagattgatgcccccatgggcgcggtaggccgctttcagaatcagcgttttcctgctccaccaccaggtggtggagtaacggtattcatattcaaaagtccgttccactgttaccaggttggccactttttcatccttctgcacaatcagggccacgccgccgtggttggaggaaaaacccttattgatcagggtgaggcccgcttccctgccggcttcaatcagtttttccgctacagccatcggcttttccgccggggcggtgatgcaggtgcgcacgccccagaacaatacggccagcacacctatcagaacggctcccctggccagcgcgacaacggcgggggaatggaaaaaggtgggggaggatccgcacatgagatgttgcgcgtagctgaagttcagggttctgggtcttcatgggagccatgttccctgatggggggcatgaacagggccaggaaggtgaaggcgatgacggtcaggtcatctatctgtcctactcccggaatgaaatccggaatcaggtcaatgggggaaaaggcataaagagccgtcagagccaggaggacaagcttgcgtctggtgaacaggcgcggttctccttcccggctgcggaagtaattgatggccctgaccagaagctgttgcctggagccgtcgggcggaatgggaatcttgtttttcatggagctgcaggggtgaatttaccgtcaatggaaaggaaactcttttttatatgggccggaagcagacccgaaggcaggataacgggcccctttgtcctgccttgtcccgggagcgacacgggcagggattttctgaagccgttttctgtaggcgtcttttcatcagggaagctcttttcttattgtctcatgcactcccggccgcgtccagagcaattcccggcttcctccgggaatgtgcttccttgcgtttggagagagcataacgtttacggcggttgcgccgtgcatgtatttctttttcctggcattgtcatcggcaagggaagagggcaaagtgccggaaagcgcggaaggaaccggaatatttgttctgtccctgccgttttccgagcctgttttcccccagccgcaaaaacgttccgcagggtaaaggagggcttcttccccattggcctgcgttcccttcccggcagggggcctcttgggcttgcggcattgacacggcgggaggcacggggtactctcctgcggcatataatgatcagttttaccaatatcagcggggccgaggaaattggggccaattgctatttgcttgagatggacggcaccaggattgtgcttgacagcgggatgcaccccaagaaggaggggaaggcggccatgccggattttgattccctggaacccaattccgtggaagccgtttttttaagccattcccacctggaccatctgggaacgctgcctgtgcttcaggagaaacagccagcggcggaggtgttcatgacgcccgccgcggcagccctgtctgaagtgatgctgcataattccgtgaatgtgatgagcgccaagaggctggacctgggcattgtggagtatccttttttcacccataatgatctggacagattgagcgacgcctggcatgccaagtcctgcaatgaagtgttccgcgtgggcttccgtcagaacgtgctggccacgttttacgatgccgggcacatcctggggtctgccggcgtgatgctggagggcgagagcggacataccgtattttacacgggggacgtccagtttgaagaccagagcatgattcccggggctgattttccggaatccggcgtagatacgctggttatggagtgcacgcgcggcggtttccagcgcagcgcccactattcccggccggaagaaatggtgaggttcgggaaagcgattgcggagacgctggaacgcggcggcgccgtactgattccggtattcgccatcggcaagagccaggagatgctgttcaacattcaccgtttcaagcagcagggggtgattcccgccaatactcccgtgtacttcggcgggctgagcgcgaaagtttccctgttgtacgaccgttttgccgggttgacgcgcaggcatgaccatgaattcaagctgaaggaggagattcagaccgtgccccttccgcgcaagggaaaagctccgctggtatgttcaccggggaatatttatgtggtgtccagcggcatgatgacggaaaatacgctttccaacgtcatggcggagcaggttcttccccaggagaagaatgctattttgttcgtaggatatgcggatcctgattctccggcgggactgctgaaggcaactcctgaaggggaactggtgaaaatgagacccaacgggcagccggtacgccgcaagtgcaccgtggactgttttgatttttccgggcatgccacccgggactccctggttaattatgccgtgaagctgaaccccaggcaggtggttctggtgcacggggacccggatgccgtggagtggatgcaccacacgctatccgccaaaatgcctgattccaccatcgtcgttcctgagccgggacgccgctacactttcgagccatgagttttaccggagaaagaaaggggaggctgatcgtctttgaaggcattgacggcacgggcaagtccacccacatcggccacttgcggaagtatttggaggggaaggggctggaagtggtgcagagttttgagcccacacgcggacggtggggccggatgctccgggactccgccgtgaccggacgcctttccgtagaggaggaagtagccctgttcctgaaagacaggagggaacatgtgaagatgctgattgctcccgcattggcgcggggggcatgggttctgctggatcgctactatctttccatgatggcttaccagggcgcgcgcggcatagatccggaggttatccgtgccgccaatgaagaatttgccccggtgccggatgccgtggtctggctggacattcccgtttccgtggcgctggaacgcattgggaaccgcggggaacgcgacgcttttgagacggaagcgggcctggcggcctgccgcagcgtgtttgcatccgtccatgctccctggatgctccgcatagacgcggacgccgggaaggaagaggtggcggcaagagtgcggaaggctctttccatgcgtttccccgatgtcattggggcataggcatctcctttcggccataggccggggatttttccttagcgtttcattcctggcatttggatgctattccgcaggcgcataagccgttggatccggaattccggcttccctgaaggcttcccggcgttccatgcaggtggaacagacgccgcagtggacggctccgcccttgtagcaggaataggtgcgggaaaagtccacgcccaaatcctggcccatggcggcgatgccgcccttggacatgtggatgaaagggcgcaggatgcccaggccggcataggttcccaggcgaatggcttccgtcatggcggccatgaattcctcccggcagtccggatagatgctatggtccccggaatgggccgcaatgacgagctgctgcgccccgcagctttccgcaaccccggcggcgatggacaggaagatgccgttgcggaaggggacgacggtctgcttcatcagttcttcatcataggaaccgtccggaatatcgtccgcgccggagaggagggctgatttcaaatgggaggagatggaggaaatgtcaatcacgcggtgttctatgcccagactggcggcctgccaggcagcgcatttcagctctcgttccgcgtggttggaggcatagtcaaagctgagggccacccggacgcggtggttccggtgggcccagtgcagggctacgctggagtccaatcccccgctgagcagtacggctgtttccattttgtccatggtctggattacagggggcggttttccggattgtgttcggctgttgcggtcagctggatgccgccgcggggggagaagcggccttccaccttcagccaccgcggggaaatggcggccaccagatcatccgtgatgcggttgacgatttgttcattaaaagccggatagttgcggtaggaggccaggtagtatttgagagatttggtttccacgcacttttccgccggaacgtaggtgatcgtcaggtgacaggaatccggttgaccggtaacggggcagagggaggaaaattcatgggtgtccagcgtgatggtgtagggacgcgtgccgcggttagggaaggattccagcctggcgtcgtcgggattggtaaagaaggagctttgagagcctaatagagtcagatggtcgtcggacatggttgttgtatatggtaatggatgttcaggtcccctggacgggggctccgccggggaattctttcacgtacaggtcctgttgagggaatgggatggaaatgccgtgttcgttgaacgcattatagatgtgttcccgcacggaggaaaggctggaggactttgtcatgacgggaacccagacccatacgcccagattgacggcactgtctccgaaactgtccagcaccacgctggttttcttgactttggaaaggaaaggcagggttgccagcgtttccagaatgattttgcgcgccctttccacgtccgtcccgtaggaaatgcccacttccaccttcacgcattcgaatttgtggttgcgggtcatgttgcggaagttcttgttgaaaagctgggagttctggaaggcgatgatagagccgtccagcgtctcgatcatggtggagcggtagcccagggaggagacgcggccccggtagccgtcgcattcaatcatgtcgccctggcgcaggcgacccagcattagggagaggccgctgatgatgttttcaatggtatctttcagggcgaagccgatgcccatgctcaagcctcccatgaccatcagcagcccgttgtagttggcgttcatgatgataagcgccgtaaaaacgaagagcccccagagaaaaagggtggagagtgtcacgaaggtggggatggtgcctacttcataatcttctccatagatttcatgcagcgtatttttccccaggaatatcaagtagttgagaacaatggccatcaggatgaccgtgatgacgctgctccagctgaaagtgagcagatccttgatttccgtggttgcgaaaattttattaatgatgaggtcccccatgtcgaaggtggcggcgggccagatgatgctgaacaggatgaggaaaatggtcaggcagggaagcagcagcttggagatgaaggggcggaaccacaggatggccctcttgttccgttccttccggcggttttcataatggtggagcagatcccacagccccaccagcagcaggatgctggtcatcagcatgatccaggtcatcagcaccaggaaggccatgaagctgaatccagtccagcacaggacgctgcccaggatggtgaataccagagatacggtggagaaaaaacggtccagtcggggcagcttgtgcctctgccgcacccaggtcagcagggagaagagggaaaccagcgtgaacaggatgggcatggaaatgtccacgatgatgttgggggccatgaacatgcgcagaagcatgaagaatccgcccagaagcagatagggcatgtagatgcggatgccggagttaatggtgccatacggaaggcgcgtgaccagggagaacaggatggcgctgaccagaagaaggaattccgcgcccagggaagccgcgctctccagcaggtagtccggcgtgcgcagtgaagcaatgacgaggatcagcgccacgataagaatggtggtgacgttggtgaaagcatggcgtttgttgtagttgcccgtctttttcagcgtttttttgaagcccaggaggacgatgaagcgggcaaggcagtaggagcacaggatgacgcccagcaggataaggccgtagtgtttgagcgtttccgtgtctgatggaagctggagcttgctgtccgcggatgtttcccatacgctcatgcatatttcatacgttttgagcggcttgagaaagatatacctggccgcatgggagggggtgtagaatatcctgttgaacagggaggtgaacatttgggcgctttcatagttcagcgcgtctatcttcctgtccagattattgaaaagttccttaaggtaaataaactgctccttttctccctgaagggatttttccagctcctggcaggcatacagagcttcgtccctctgcaccagggatggttccgacaggttggccgtgttgacttcctccagggattccgccagtttttctatgcgttctatttccttgctcagccgttcctcctgttcctggaagtccggtttttgggcgtaatacatttccaccagcctggtggcggccttgcagtaaaaagccagcgtaaagattttttgatcgtccaaggcgtaaagcacggcggacatttcatataccctagtgtcaaaataattgtaggtggcgtccgcattctttaccagcacttcccggacggccatccttttttcctcattctttttcaggatggtgatttcatggcacagggccatgataaccgcatccatttccgattggttcggctgcgtctgaggctgttcctgcttggcttcctccgcctgttccggggcggcggaaggcggttccgcctgctgtgcggacgcagaacctgcggccagaacccccgccagaaaaaaggcggcgcagcggcggaaaaagatccggtaatcagggatgctcatgaatggtccctgttctaggggctgcgggcattacggtcaaggttatatatttttcctgctgacggagggggagattctcaggaaaagcccgttttcttcaaagcaggacgtaggaaagggcagggcattttccgtgaattcggaaaatgccctttcgtaaacaggaaacgctccggaaatcttccggagcgtttgaagagaaagctgattccggcgggaatcagtccagggaaaaggaacggattctccttacggtttcctcccggcccagcagggaaaagacggaggaaagatccgggccgccgcttaacccggtgagggccacccgggcagggaacatcacggcccccatttttacgccgttttccttggcaaaggctttcagcacgccaatgagttcatgaccatcccattccggttcctgttccagcctgtccgccagtttgaaaagcagttccagggcttccggctgaaccttggagacggcttccgaatccatgcacagttcaaaaaagaaacggattttatccgggacttccgccagggtctgcaccttcgtttgcacggtggcgatggcggcgtccagaatcggggaatcaggcaggccggctttcaaacagaaagggcgtgcccggagggcgaattcttccgcaggcagggcgatgatgtgctgctggttgacccagcggcatttggtgatatcgaatttggcggcggagtggttaacggcttccagagagaagcgttcgatcagctcctgaggggagaaaatttccgtatcgtccttgggggaccagcccagcagggccagaaagttcatgacgccttccggcagaaagccttcttccgggtaggttcccagggcggcgcccacgtcacgcttggacattttggagccgtcctgattcaaaatcagcggcatgtgggcgaaaacagggggagtgacgccgaaggcctcaaacagctggatgtgcttgggcgtgttcatgatgtggtcttccccgcgaatgacgtgggtcatcttcatctcaatatcgtctaccacgttgacaaagtggaagatgtaggaaccgtccgcgcggcggatagccatgtccggggtgttggaggcgtcccggtagtcaatggtgatgtctccgcaaatcaggtcatggaaggtgacgggtttggagcggtcaaagcggaaacgccaggctccttcatcctcgtacacgcggccggcgtcctggagcttcttgaaataggcgtcgtaaatatcgttgcgctggctttgaaaataggggccgcaatcgccgcctttcatgggcccctcatcccagtccagccccagccattccatgccggtgaagattgcgcgggtagcctcctccgtattgcgggcgttgtccgtgtcttcaatgcggaggatgaaggtcccccccatcttgcgggcgaacagccagttgaacagggcggtgcgggcgcccccgatgtgaaggtagcctgtgggggaaggtgcgaatcttgttctgacgtgactcatgatgggtaagagagtaagggcctctcttcccgcgtcaagcagatacagggggtgcatgccaaaaaacggggatgcggaggcagtggattttttaggacgttgtcggccttgcggcttgcgtggagaaggcttttaggcttcatttaacgccgtgttctttttaaaacacatattccgtctgcgggagaagtggcagattaaaagggaagatgaggaaaagccctttctggagcatctggacgacctgcggaccatgctgctgaggatggccctgtgcctgaccgtcagcacaattctgtgcgccgggtttgcgtccaatctgatggacatcctgaggcgtcccgtcaaccaggtgtgggatatgtttgaagaatcccatcttccggcaggtattggtctggatgcctggggcaaggccaaggaaatggcaacggccatgacgagcctgggagcttcccagcgggcattgtttctccgccaggtttccccatcccaggcagatttgacggaggctgccctggtgcttcgcggcgcgcagccgctgccggaggacaggaagcagattttcatcagggaaggcagcccctccacggccgtgagggatctggcggaatccctgtattccaaaggagccgtgctggcagacggaacggggcggggggccctcaagatgatgagcgcgttccagcccggggaggcgtttatgctgaccatcaagctttccctgtatgctggagtggtcatttccttcccgcttctgttgtacttcctgctgcaattcatcattccggggctgctggaacatgaacgcaagctgctgtacaagtgcatggctgtcggttttggtctcttcctggccggaacgctgttctgttacttcatcgtcctcccgcgggtattgacgtttttttacacctattccttggaattcggcatctccaatgaatggcgcatcggctactacctgtccttcgccacgcagatgattttaatgttcggactggcttttgaattgcctgtggtagtgatgcccttcgtcaaactgggggtgttgacctatgacatgatgaagtccacgagacgctatgccattgtggctatcgccgtcctggctgcggtcatcacccctacgccggatgtagctaccatgatgctgatggccgttcccatgtatgcgctgtatgaaatatgcatcattctggcctggatgcatgaacgcaaggaagccgcgcgcgcccgggaggaaatagcccggtttgaagaagatttcaacaacaacaattctccctacaaccagtaaatacatccaacccacgccaatatcatgaaccttctggaaattattatcctgggcattgtagagggcctgaccgaatatttgccggtcagctccacgggccacctgctcctgacggaatccctgctgaacatgtcccagagcaaggaagctctggatgccctggccgtctgcatccaggggggagccatcctggcggttctgagcctgtattttccgagggtaaaggccatggcgcagggcgtgcgcggcaataaccccgccgggctgaaactgctggtcaacctcattctggccttccttcccgccgccgtggtgggcctgtgctgcgcttcactgattaaggaatatctgttcaacacatatacggtggcttattcatggatcgtagggggaggcgttattctggcgtattgcgcctggcgcaccagggaggggcgttccaatgaaggggactccggcgcctccattgaaagcctgacgccgggcaaagcgctgacggtgggtgcgctccagtgcgtggccatgatccccggcaccagccggagcctgatgaccatgctgggaggcatgttcgtggggttgagcgtggaagcggccgtggagttcagctttttgctgggattgattaccctgggcgcggccacggtccatgatgcgtataaggacggagctctgatgctggaatccttcgggtgggaagcccttgccgtggggacggcggtcagctggctttccgcatggctggctgtaaaatggatggtatcctatctgcaaaggcacagtttttccgtattcggatggtaccgcatcgccattggtatcgtgacgctggttctcctgtccatggggctggtgcattgaaaaacggattccggcattcaagcaccggaaaacgtttttttccggcaaggcggttctctcccgcagcgggaagcgggttttgaacaatcccggagaaggttggccgctgcctggacaaagccatgacacagggccgttttgcatccccggaacaaaacagccctgcgatgaatagcgtttcaggaaaacttatctcctgtgcgttccgtgggaattcccgggattggagggtttcggtgaaggagatgaatgaggggaggacggcctgctgggtgcgctggcggaatggggcggggaagaaggccgggaaacgggagagggcctgccgggacggttgatgccggagtggcctggattgggggaggaaggccttgaagacggcagggtggaagggcggctgggacgtccgaaatccggtctggagggacgattgccttccgggcggttgatgacggggcgattcgtgccgccgggacgggaaagattattggcggaggggcgagaaggccgtccgggctggttgattcccggatgatgtactggcggtcgctgtaaattgccgggttttccaaagtccggccgttgattgggccgtccgggctgaggggccggcctgttgtttcccggacggaaatggtcaggcctgaagtggggtttcatcggcggttttgccatggggcggcagttatggggacggacataatgcccgcggtaataaggagccggcccccacgtgggaatatagtaattcggacggatcaggttgatggagtaaatggggcttccgaacgtgtcgtaggcataaatgggtcttcctccataatatccgtaaatggggtagccggagctgtcatacatgtacgacacgccggaacctccgctgctgtaggagcctgacacgctgaaatggtcataataaggatcgtagcagctggacaaagcacagccgatagcggccgccagcagtgagttttttaagataacgtatgctttcatgatgacgaaacggggtgaattatattttcccttcgcctgaaaagcggcaaggaaaaagtacatttgtttaaaattattttgcttggaaacgcacttactgttgtcttagactgcaaaaacgttctacgtgatgggaattctttttcaaaataaaaaagtcggtctggctctgctgtgcgataacgccccttatacgctggccatgactctggcttcctatggcaggtccgggctgcttggctattttgacgaagcatgcgccgtttttccggaaagcgccgtcaaggtgcgggagacggccctttcccatgggctttccgcggtggccgccccagtggaaggcggttttattggagccctgcatacggcggtcaacgctcttgatacggattacgtgctgctggcggaggatgactgcatgatctgggaacacctgcgcggggaaaacctggaaaagcagttgaaacgggcattggacctgctgatttccggacaggcggatatggtgcgcctgcgccatgcatggcgcggttgcacgcgctataaggccgcttatacatattcctacttttatcccgtggaacagctagccaccatgtgggtgcatgcggaaggtttgtcggaagcgccggactggattaaaagcatccggcgcttctttcaccctctccgctccaagcgttcgataggccgttgcgtttatgtggagcagaacccgcatcttcgctttccccagtacattaccaagattgatgaaggctatattattgacagcgaggttttccagtggaccaatcagcctacgctcatcgcacgttccagaatcaggcagattctgacggggctggagcagatgtccggctccatcgggaaattgccgcaggattttgaacatgccgtcaatagcccgcgatggaggaacgcccatatgaacataggcgtcatcaggggaattttcacttaaatgcgtatggaaaacggcggaaaagcggtgcggtatgaatgcaccagatgcggcgcgtgctgccgctgggccggggatgtgtgcattgagacggatgaaatccacgagatttcccgtttcctgaacatggacgaacaggtttttattgacacatgctgccggttgagagccaaccggcgcggattgtctatccgggacgcggaagacggagcctgcatgatgctgacgaaagacggctgccggattaatcccgttaaaccccgccagtgccgggattttcccaacaaatggaattttcccggctggcgggatttgtgccgcgccagagaagtgggggaggaacgggaagcataatatttgccgggatgccgcaagattcttttcttcttccggcattattccatggacggggtgaaatccggccggaatcttgtgttttttacaggaactgagccagatcccgttcaaaaccgggataggacgtattgatgcattccgcatccgtcactacggtttctccctgtgcgctgagtccggccaccaggaagctcatggcgatgcggtggtccccataactggataattccgttcccttcagggggtgccgccgtgaacaaccatgccatcatcaaattcttccacatccacgcccatgagccggaggttggcagccgtggtggcaatgcggtccgtttccttgacgcgcaattcgcgggcgtttcggacgatgaagtctccccggcccagggctcccgctacggccaggatgggtatctcgtcaatgaggttgggtatttcttccgggaggaggctggtgccgtgcagggaatccgaaccgtacacggtaatatcgccgtatggttcgccggcatcttccggagaagtgggcacgatgtccattcgcgcgcccatcctttgcagagcgctgatgacggcgttccgcgtcttgttcagccccacctggcgcaacgtcaggcgggaccccggccggctggcggcggctaccatccagaaggctgcggaggaaatatctgccgggactgtcaaattatgggcgacggggagagccggcccgcaggttccgacggtaagtccatccacggtgcagggaacgccgaaatggcggaacaggcgttctgtatggtcgcgggtggcggccggctggcgcacggtagtggttccgtccgcaaacatgcccgccaatagaatggcgcttttaacctgggcgctggccatgggaagcgcgtaggaaatagggtgcacccgcccgccgtgaatgctcagcggagcacagcccggtttggttccccgggcttcaatccgcgctcccatttgttccagcggctgcatgatgcggcccatggggcgggagctcagggaagcgtctccaaacatttccgaatcaaaggggcaggcggccagcatcccggccagcagcctcatgcccgtaccggaattgccgcagtcgatgggccgttcaggagccttggggctcatggcgacgcccgtaattcggaagcggacgggaccgtatccctgccgttcttccagcacatccactttggcgcccagctgctccatggcgcgcagggtattcaagcaatcttcactgcatagaaaattatccacttccgtcactccttgcgccaggcctcccagaatggcggcgcggtgggaaatgcttttgtctccgggtacggtcagtaccccttgcagggaggaaatggaatgggaatgaaggttcatgagtttccggaataactaccctgtatcggctgccgaatcaagccaattacgagacgggcggaggcatcaggggacattccagaatggagttgattttccgggacggtagcgtatattcatgtgcgttatcggctgcatccccctgaaaagaaggagagagcttttcaggatcaatggatcaagctggttttcataggtagtaagttggagcggccacgggagcagtcctgtggccgctttgccttattcagggaagagggcgcccattggcttgaagaaggaagcggaaggaagaaagaaacaaaattctttccatgtctgctttgggctttaccgcgagccgatgaaagcgtatgtagtccatgccgatcaggttcgggtggtcgctgttccggtctccggaccggagtagaggaaagtccggacatcacaaggcagcgtgtcccgtgaaagcgggagacgggaatctcccaagggttcccggacggaaagtgccacagaaaacaaaccgcccggatggggttctcctcatgccgggcaagggtgaaaaggggaggtaagagctcaccgctccgagggtgaccaaggaggcatggtaaaccccgcgcgatgcaagacaaacaggggaagggtcgcctgcccgccggatccccgggtattagtcgcatccgtttcgtgaaagcgaacgggcgcgcggaacgtctgaccgcggtccgcgtgagaaaaatgaccgcacagccggctctgtccggcggacaaaatctggcttacagaacctggtcggctcctgcttttttaccatgccgttttccttccctcttttcgggggaagagaaacatccgggaatttgtcccgttccgggggctctttggggttgcatgggcgttttaaatgtgtagaatccgtcacctaattgcaacccactatggagaagcttgtcgtacatggaggttttacgctgaggggagccgtcaatatcagcgggtccaaaaatgcctccctgcctattttggccgcatccctgctgacggatgagcctgtagtggtgcgccgggttccggatgtttccgataccaatttcatggttcagatcatgggccagctgggagcctccgtggaacggtccagcggcaatgtgcgcgtggaagccaggagtctgcattccgaagccgcttatgaacaggtacgcaagatgcgcgcctccatctgcctgatggggcccttgatggcccgcatgcagcggtgcgtgattcccctgccgggcggctgtgtgattggcgaccgtcctgtggatctgcatatcagggccatccaggcattgggggcacaggtgcagattgagcgcggcaacctgattattgaagctcccagggggttgaaaggagccacggtggatttgagcggcgaccacggccccaccgttctgggaacggacaacctgatgatggccgccgtattggcggaaggcaccaccgttattgaatccgcagcctccgaaccggaagtggtggatctggcgaactttttaatcaagatgggcgccaatattcaaggtgcgggaacgcgccggatcgtcattgagggagtggaaaagctccgtggctgcaaccataccgttatcccggaccgcattgaggccggcacctttatggtggcggcggccatgatgggggatggcgtgaccctgcggcgcgtgtgtgaggaacacatgactgtggtgacggatttgctccggaagtgcggccaccacgtggaattcaacgagcggggggatacggtcaccatcattgccgggaaaacgcccaaatgcggagaaatcaagactgccccgtatcccggctaccccacggacatgcaggcccagatgacggctctcttcgccaccacgccgggcatctccgtggtgaaggatactattttcccgcagcgtttcatgcactgctccgaactcaagcgcatgggggcggacatcaaggtggataacggcaccgccgtcatttccggagtggaaacgctcagcggcgcccccgtcatggcctccgacctgcgggcctccgccgccctggtgctggcagccctgaaggcggaaggcactacggaaatccaccgcctgtaccatattgaccgaggctatgaaatgattgacgaaaaactcctggccatcggcgctgcagtagaaaggctgccggatgacgacaattaacgccgttttaggtcctgattttccttcataccgcattttttctttactgtcagggctccatatgctattcaccgaagtcctatgaacaaggctcaactgatcgaactgattcaaagcaagctgggtgctgatacgaccaagaagcacgctgaagaagctctggccgctgtactggaatccatcaaggaaggcgtgaaggaatccggcaaggtgcagatcattggctttggtacttttgctaccaagacccgtgaagcccgtaccggccgcaacccgaagaccggcaacacgatcaatattcccgcctccaagacggttgctttcaaggcatcttccgccttgaaggactaagacggcaactccttctcaagggagtacttttctttcagcacccccgtcctttgaggacaggggtgttttttatgtcccgctgcggatgcccacggcttgaccggatgaacgccgccgtctagaatgccgccatgtccagcagttttggtcaggtgttcagaatttctacctggggtgaatcccatggaactggggtaggcgtggtgattgatggttgcccgtccctcgtcccggtgatggaagaagacattcagcgggagctggaccggcgcaggccgggacaaagcgacatcgtaaccccccgcagggaggaagaccgcgcggaaatcctttccggagtgctggacggcaaaaccctgggaacgcctatcgccatcagtgttcggaacaaggatcaccgctcttccgcctatgacgagatggccagcacgtaccggccttcccatgcggactacacatacgacgctaaatacggtattcgcgcctgggcaggggggggccgggcctccgcacgggaaaccatcggccgcgtcgcagccggagccgtggccagggctgtactgaagcaggcttttcccgacatggaggtcatagcctgggtggatcaggttcaccatgtgaaagcttccgtggactgggaggccgtgacggcttccgttattgaaagcaacatcgttcgtacggcggattcctccgctgcggaagccatgatcgctgccatcaaggaagctcgtgactccggaaactccttgggcggcgtggtcaaatgcgtggtgcgcggctgccctcccgggctgggtgacccggtctttgacaagctggacgctacgctagcccacgccatgatgagcattcccgccaccaaggctttcgccgtgggttccggttttgaagcggcgggcatgaccggtctggaacataatgaccctttttacatgcagggccgccgggtgcgtaccgccaccaaccactccggcggtattcagggaggcatctccaacggggaggacattctgatgcgcatcggcttcaagcctacggccaccttgatgattgaccagcagacggtcaacagggacggggaggatgcccggctcaagggcaggggacggcatgatgcctgcgtactgccgcgcgccgtgcccattgtggaggccatggcctggctctgcctgtgcgaccactacctgcgccaacgctgccagagggctttgtaacaaccggtttcacggcttcttttccctcactcatggattcctccctcacattttacctggttctgggcgcattgctgctgggtttcatcgtgctcggcatgctgaaggggatgattaagatgctcctgttcggtgcggcagtgctctcttccgtagccgcttacttctggctatccaaatacggtttcacctacctctctttcatcaccagcgatcctcgggaatggatggtcactgtgctgtccgtcggaggcgcggcggcggtcttctttgtctttatgcacggtctcttctggttcagcgacgtcttctcctggggacggcgcatgggcttcggcgggaccaagggaatcgtcacgacggtactgatggcggcagtcgtatgctgggtgggagtcatgtgcatcttcttttacggctccatggcggaaatgacccgcgcccgagaactggccctgtaccacatggaccccaaccgcaccatttccctccctgccatttattccatcaaaaagtccatcatggacaacccccacctgagctggctggaaaaaatatctccggagcatgatccggaacggctttccctggcaaaaatgatcgcctacctggtgacgctcagtccggagctctccgaccagcggcgcacccagctggactgctatatgccccgttcccgcattaccagccgcgtgctaagcctgaaaagcctgagcgaagaccccgccatccgtcttctggtgcagaagggggatatgcagggcttatacaatgacgtcaagctgacccgctttctggaagaccacgatgtccgttccgtcctgtcccaactggatgttgatcgtgtgctgggctttgtcacggaaattcgccggacggccccagccggaaatgaatacattcccgaagccacgccaattgagtgataaacgcggattttttgttccgccgtagtggattcgttccttttatccgcctttaattcaagaaaaaatcagggaattatccccccttgcgcccgaaccggaaaaagagagttcctgcttttttcaggaaaaagcgcttcctccaggcgttcgtcccggaagaagcgctcttttgaagataagatgactgaaatcttgaaaaaacatcaggagagtttttccgcgatggcatccacccattccgggaaggtgtcatcatggtctccattggaaagcactaccggcagaagcctttgcgctttcaaacgttccaggaaggaatcgaagtccttgccagcctggcagaagttttcataaaattcatctccaagggcaaaaacggcgtagcttacctcggacaaatcttccgaagagtccttcaattcctgatggagggcctctgcgttggtgggaggttctccgtccccccacgtactggtgatgaccagcagcgttcccgcattcttcaactgttccaccgtcataccttccatgtcaaccacctttgcctgatggccgagcttggtcaattttgcccgcgcgtcctgggccagactctccgaattgccggtttccgttccgtagataatagtgatttccatgcgttctgattattggttcgacaacgaaagttagattgaactaattaaacaggcaagacaaaacagcggaacgacggttgaatttttcttccttgttcatccttccgggtaactggttttccggaaaattctccgatgccatactactctcgtttgattatcaaagtattcggatactgtggaaaggtgaagcaccagccgaaaagacgcgcaaaacggtagtataatcccttgcggcaggaattttggctggtcatgatatcgtaaaaagccaggtcaatctggcttctggaaataggggctccattcattttggcgtgcagcatggcgtcgtggaacagggaagggaggagcatatccggaggggtggacccccaggtgacgccgtcccagccatagccgggagtaatgctgaaacgaccgccctccgcctgcatgcgtatggatgggtcatacacgctgacggctgtccagcggccaaaatccgccttttttcttccgctggtccagctgatggcgtttttagtgatgtagaaaggcttgtcttcatagagggttccttcataccagcctgccacgggttccggagccgcggctggcgtggagcaggatttcagaaacatggctgcacatattgttgtgaacaatatgtaaatacaatgtgaataagaaataaagggcatgaggggacggagcgttatccggatagttgtttcttattggatttccagcacgatgatttccggagggcagcagaagcgcaggggaagaacgctgcatcccaaacctcgggtaatgaggaagggagttccgttcagctgggaccagggataggaaaatttgaccttctctcgtgagatgtttgccagggccctgcctccgggaaggcatatctggcctccgtgggtatgcgcgctgatgacgaggtccgccgtgccgggagccagcaggggaaaaatgtcgggtacatgtgaaagaaggatatgcggaatatccggggaaaaacgcagaggcaattcctccggcctgattctcaggtggtagtcgtccctgacggaagagagctgcagctcacggcctccgggaaggtgcagcagcagggaatcattccacatgggcaggatgcccagcccggaaaacatgttgcgccataagttccagccgtaatactggtcatggttgccctgcacggcaaaaatgccgagaggggctttcaacatcttgaaatattcccgggccgtctccggggccatgctgctctccctcgtgtggccgttggcataatcccccagcaggaaaatcatatccggccgagcttccatgattgtttccatgtacttgtgtgccagatcgcctccgttcggacgcagatggaaatccccggcaatcgcgatgcggaggggagggccttcttttctcttccactgaggcatctccatcgcagccgtgacggtttccacacgcctgggttccacctgccatgcccacatgaataaggagaagccaatcatcaatattgggacaaagatgattgccaatttgttgagaaagggtcggcgtggtcgtgacttcatgcagggcagggctcctgactgattatgaggccttttaaccgattttcaatcattcgtgtttgctaatcgggaatttgctggtatgatccgtcccgctcaaggtagcggctgtccgatgactgcagctctatcttcatattaacatcctaataccatgcagtttacacacgaaatcgaacaaatgtgttgcgtcaagaaaggctgcaaccatggtccggcccctatcccgcaggaaggcaactggacgcaatccagggaaatcacggatatttccggcctgacccacggcgtgggctggtgcgctccccagcagggcacctgcaaactgacgctgaatgtcaaaaacggcatcattgaagaagcactcgtggaaaccagcggctgctccggcatgacccattccgccgccatggctgcggaaatcctgcccggcaagaccgtactggaagcaatgaacacggacctcgtgtgcgacgccatcaacaccgccatgcgcgaactgttcctgcagatcgtgtacggccgcacccagagcgctttctctgaaggaggccttcccatcggcgccggtcttgaagacctcggcaaggggcttcgctcccagattggcaccctgtacggcacccgcgccaagggcccccgctatttggaaatggctgaaggctacattaccaagcttgccctggatgaagacggtgaaatcatcggctacgagtttgtgcgcatggggccgatgatggaaatgatcaagaagggcgtggacgccaacgaagccgtcgccaaatgcacgggcaactacggtcgtttcgacgaggcagccaagtacattgatcctcgtcacgaatgagattgaattaaaaagagtatcttaacttcaagcactattactattatgcctcttttcgaatcctacgaccgccgcatcaagcagatcaatgaagccctggccaaatacggcatcggctccattgaagaagcggaacaactctgcctttccaagggaatcaacccccgtgaaattgtgaacggcattcagcccatcgcgtttgaaaacgccggctgggcctatgtggtgggagccgccatcgccatcaagaagggctgcacgaaagccgccgacgctgctgaagccatcggagaaggccttcagtccttctgcattcccggctccgttgcggatgaacgcaaggtgggcctgggccacggcaacctggccgccatgctcctgcgcgatgaaacggaatgcttctgcttcctggccgggcacgaatcctttgccgccgctgaaggtgccatcggtattgccaagtccgccaaccgcgtccgcaagcaggatctccgcgtctgcctgaacggcctcggcaaggatgccgcgtacatcatctcccgcatcaacgggtttacatatgtgcaaaccaagttcgactatgccacaggcaagctgaacatcatccaggagaaagctttctccaagggccccaaagccgccgtgcgcgtgtatggctgcgatgatgtgcgcgaaggcgtggctgtcatgtggaatgaaggcgtggacgtttccattaccggaaactccaccaaccccacccgcttccagcacccggtggccggcacctacaagaaggaatgcaatgagaagggcaagaagtacttctccgtggcttccggcggcggcacgggccgtaccctgcacccggacaacatggcggccggtcccgcctcctacggcatgactgacaccatgggccgcatgcactccgatgcccagttcgccggttcttcctccgtgcccgcccatgtggaaatgatgggcctcatcggcatgggcaataacccgatggttggcgcttccgtagcggtggccgtggctgttgaagaagccgccaagcagaacgcctgagcgagcagctgatcaaaaaaaccgcagagccgctttccctaatcgggaaagcggctcttttagcaattgaaagaaaaagggggatgtccccatttccggccccctcttcctgcccttgtatccgcatcagcttccgatacggaatcttccatcccggtccgcccggggaggaagtccgcgcgaaggaacggatcttctggaaacggattcctggctggcagaggacggcttgacggagcggatttccgggcgggaggcagaagcgggaacaaccgtttttcccggttgcgtgccgtgggaggaagggagaacaggaacggttccgacaaccgttttttgccgttcatgggccttataggcgcgttgcagggtaaaatcccgctgttctcccggtctcagggaataatccgcctttttgggagctccggctttttgcgccagaggttccacgcgccgctgcagctgtgcggcggcatccagtttgcctgccacccattccggattccattccggctcggatattttcagggactgaagcaactgcgccgcttttttgccgctttccagggctgccttataatccccctccttctcctgccgtgccgcgcgcgtcagggaaaggttggcttcgtaaaaagtgtctccgggattgccaaaggccgttgtagccgccaggaacatgcagagcagggaacagggtagaaacttccttttcatgattgttggcacgataacatgattcctcgttttggaaagtcctttcttccggcatgttttgcgcagggccggactccgtttcccttgcggatagaggaaaggttctccatcccgcaccctggagcaacttgacggaaagtccggagtgccgtatgctgggcgggacctgctatatgacccggaacgagccatcatcccttccagctccgcagatggaggaagatcccagattcctgacggaacaaattgtaacctatttgggcaataagcgttccctgcttcattttctggggacgggactggaacaggtgaaaaaacgcctgggtaaggaaaggctgaaagcaggggatcttttttccggcagcggcattgtggcgcgttttctgaaacagcattcggaagagttgatcgtcaatgatctggaggaatacagccgggtcgtcaatacctgttacctgagcaacgcggaggaagtggaaaatctggagctggacaggcattacagacgcctgctgcggtatatggaaacgcatgaatccccaggcttcatcacggaactgtacgctcccagaaatccggactgcatcacggcggatgaccgcgttttctatacgcgccgcaacgccgtgtacctggatacggcgcggcagaccatcaatttgcttccggcagaaatcaggccctattttatcgctcctctactggcggaagcttccgtccacacaaacacgtccggcgtattcaaaggcttttacaaagacagaaacggaatcggcaaattcgggggaacggggggcaacgccctttcccgcattctgggcgacatttcgctgccgtttcccgtgttttcccggtttgactgccggtattccatccattgccgcgatgccaatgaactggctgccgagcttccggaaatggatgtggtgtacctggaccctccctataaccagcatccgtacggttccaattatttcatgctgaatttgctgtcttcttatgaaaagccggaggaaaccagccgagtttccggcattcccgcagattggaaacgctccatgtacaacagccgtcagcatgctccggaggccctgttccggctgctggaggattgcccggccaaatttattctgctttcctacagctcggagggattcatcaactatgaggaaatgaccggtttccttggacgcctgggccgtaccgttacgctggaaacgccgtatgccgcgttccggggcagccggaatttcagaaaccgtcctcagaacgtgacggaattcctgttcctggtggaacggttttaacagacaacaggaaaggcaagcctccatgcagactcatttggaacgcttcatccgttttctggccgcggagaaaggcttgagcaccgcctaccagctttccgtgagacagactctggaggaatttgcccggtttctggaaatggaaaataccggccttgcccaaacgggcattgatacgctttcggcatttctgcggcatttgcaggaccggggcatggcccgcagctccatgcgggtggaaatggtgcatctgcgtatttttttccggtggctggccggaacgggaatactggaaaaagacccttccgtatttctggaaatgccccggcaggggctgtcgcttccccatgtgctggatcagaaaaccgtttcaagtttgcttgaaagcattgacattcaagatattcctttaggatgtagagacagagcgctcctggagatgatttacgcctgcgggatgcgtgttagcgaaataatcaattgcaaattagagagttttgatagagatgaagcttttgtccgcgtgctggggaagggggataaaacccggctggtgcccgtagggagatccgctttgaacgctttgcaaatgtatttggaaaaaggaagacccaaactggtcaggacagtgacgaaaagtcatatctttctgacaatgcgcggtcgaccgttgacgagggagcgggttcgccaaattctccgggaacgtgccagagccgcaggactggaacagcatgttttcccgcatatcctgcgccattccttcgccacgcatcttctggaaaacggagcggatctgcgcattattcaggagatgctgggtcatgccgatatttcaaccacccagatctatacgcatttggagcagcagcggctgaactcgattcatcaccgctttcatcccagaggataggaacgctaattcatcattcattcccatgccgcgttttttcacatcctcccaatcatatcataatcatttaaatattaacgcccggagaattattctaccggaattatatttggcattacatatattatgcgaagtatagtttaggcagcattctcccattctcattggacggaaaacgcgctctgtcacttgacaaatatgcaagcatttcatagcttcattaaatgagtggcccttgccttgtccgtaccgttgccattttcatccttttttcatctttttcccttcttcatgccgaagatgaggaattttccgatatcatggaactggtatcggaaacggagaactgttccgccaaactggcccgtgacaaaaacgcgacggaagaacagaagaaggaagacagaaagcgcaggaaaatcggcattggagaaacggtcaccgttaccctgaactgtaaaaaaccgtttttactggaaccgaaggatcaaatccaatggaaagtgattgagggaaaagagttgcttgaaggcggtctgagaaaaatccccaatagttatcactcggtaacatttcaaataaatccttgcgccagtaaagaacaaattcagcagtccggagggaaagtagccattgaagtggaaacagaacagggaacagccctcccccgccctattgaatttgacgtggttttccctgaacatcttactgcggaacatgaaactttgggcgggatggttaaaggcgttcctgcggcagatatgggatttccaagggatggagattctgcacatggagtttccgcccagcttctcgtctccatccatcccctggacgtctgttttgacggggtctatgtaattgaaaaagacaaaggctatgcaggagctgccggaagcctggctcagactcattcggcggacagcatctggcgtgtaggtatcgacaatcgttttgaccagcacgacaatatcggcataaaatccgggaaaaacggggacatgcagtgggatgagattcaaagttatgacgctgacggaaatcctgtctataaacattcgtatcccaacgcattcacatggaattgcctgttcagaacataccagtttatggggaataaagaggggatatccgatatctccactgtctttcagaggttttatatagagaacagaggcaatggcctgttttacgccagaatccgaaaatttctggttgatcccgaaaaaaaggatgaatgttccgtcgaacgcactaccggcggcagccatatttttaaaccctgatataatataaatatgatgataaaatctcggaagaactgttttctgacttgttttgccgccataacgctgtttgctgtctttttttctgtgacagccttgccaacgttcggctctatcccgacagattcgcaggaattgacattccatgcagatcctgtgctgaaagaacttaaaattctgctaaaacagggagatctggtaaagttttaccaaacagcccacacccatatggggcagcttgagtggagagacctcagagggggagtttccccggataagctggatcggttattgctgatcgcccggctagcttccgcagcccccctgtttaaagaaaacgagagcacgccgttcgaacaaatgacgcaggatttcgattcggcaggagatattcgtctcaaggggaaagttatggtagatctggtcatcatttccaaaatcaatcttaggcaacaatgctctgccgtgagaaagaaagaagtggggcagctttgctccatttacgcggcaacgatgctgaagatgatgaaagaatcctacattcctgatttcgagggctggaagaaggaaaccatggaaagaaaaacggcggcctggaaaagagtgtttgacgccaaatgggagtctttcctgaaagaaagaaacgagagagaggagcgagccaggaaggagctatccatacccttcaaacagagaatgagaatgagacagcaaacaacggaagaggaaaagaaaaaggatcgggaattcgcggaacaggacgacgcctatatgctggaggctcgaaaggaatgggacaaaaaaaggaacctgtccaacattctggggtccatgggaggaaggaactccagaatcagatcattcctcaaagatggaggaggaggtttattacgaattttgttggacaactaccccggcaaagccaccgaagtatttaaatacctgaagctggcgggatatgaggaaggagaaatgatggagttggttgatcgggaggagggaaaaaccgaagaaacggaatttttgtatcaaagcccgttgggaagaaagttcgttaaagagaagaaacaaaagaaataattactgccagagcgcggaatcatgatatttttagtttgcaaggatattttatctttttgagattccttctctcttgccagatcacctttcatccttcataataaaaaaagcatgaatactttcgtttctctttgcctggtcgggagcctcagcctgggttccctttgttatgcgcagtacatggataacgatgccaagaagaaggtaatcaaggatttggataatttgctcgctctgaacaggtctgcagaaaccaaggtaatcaatgccgctatcagcaaactgaattccgccggcagggatcccggcgccgcatatgacctgctgattcagtccaagaagtttctgatggaaacggaaaaggagaaggacaagagccaggggaagagtgccaaaatcgcctccaattccatgaaggactggatggaccgtgaagcgaagaagtaccaggataaaaatgcccgtaaaggattaatgcttcaatatcaatggggagttctcgtcctcaaggctcgtcttaaggaaaatttaatgaacgccacctccaattccaccggaggaacagcggaggaaaccctggacgttacggagttccagaagccggccatggatttgctgaatgcctacctgtccgcctgctccgaccctgattttgtcgacccttcctcttctaaaaacaacaatggggcagccggaagagccggcgcccgtattgcggaacaatccgtccttaatacggaagtgggggaggccctgggcatcagcagcatgtcttccaaggctttcccggattccatgaaaaaccgggatgaaatttttgacaagctgtttttcaccggataccggaagacccgcaatcttcccgccctcaggcaggcgtggaacaagagaatttccatggaagtggctctgggaaaaatcagccatgccatttcctccggcaagaaatccggcatgcagggccgcatcgccaatgcatccgaagacgaatttgatgagcagggagccgccgttctggatcgtttgcgctggcgctgcgaactggattgcttcgacttgggagaccaggcaaacgccacgaggaatatgatgacgctgatccggacgacggtggatcccgtgcgccgggaacaaggtatccgcaccctccgggataaactggttcagagcatgaagagcttgatggattctccggaagaagaaagcatggctgacggttcctcttcatcctctgcaccgcgtcctgccatgcgttcctccaaaaagaaggctccctccaccacgattacgaccagccgtgaaatggatgatcccggagccatcggaacggatgtgccgaagcctcccaagccggccccagcccggagtgacgatttttttgaagacatctgactttcttcagacaaaagatgttgcccgaacggcggttcccctgttcatggaatgcgcagagcatccttgacgtccggagccgccgttttatacattaagggcatgtatcagccatttcaatttttcatgcccgcgcaaatctttttcggcgcgggttctttggacaatcttggttccgctcccctgcccggcaccaaggccctgatcgtcatcggcgggtcgtccgtcaaacgcctcgggtatctggaccgcgtacaggctcttctgaaaaaacagggagtggaaagcgttgttttcgataaagtgcagcccaaccccgtggtggagcacgtaatggaagcctcctccctggccagggaaacgggctgtgatttcgtcatcggcctgggcgggggcagcagcatggattccgccaagagcatcgccgtgatggcggccaatccaggaacctactgggattacatccagggaggttccggcaaggggcttcccattccctgcaaacctcttcccatcgtctgcatcaccactacggcgggaaccggaacggaggcggatccgtggaccgtcatcacgaaagaggacacgcaggagaagatcggtttcgggttcaagggtactttccccaccatgtctatcgtcgatccggagttgatgctttccgtacctcccaaattaacggcataccaggggtttgacgctttgttccatgccgtggagggatatatggctacaatcgcctcccccatgggggacatgttcgcgctccaggccattgaatacattgccaaatatcttccgcgcgccgtaaataacggggatgacctggaagcgcgcgcctatgtggcgctggccaatacctattccgggtttgtggaaaccatttcctgctgtacgtcggaacattccattgaacatgccctcagcgccttccatccttccctaccccatggcgcggggctaattatgatttcctgggcctaccatgaagcctatgctccctcctgcccggaacgttacgcaagagttgccgcagccatgggacaggaagcctccgtggacggtttcctgaacggcttgaacagcctgaaggaagcctgtggcgtagacaagctgaagatgtccgaattcggcattacaccggatttatttgacgaatacgccaaaacggctttttccaccatgggcaatctgtttgaactggatcgttgcaagttgactccggcggacgtggtcagcatcctggagaaatcctattcctaggaacaagcagccggggatcccatgccgggctggctgccgcccgcccggcagaatttttgccgttccaatgcattgggaataccgttaatttccatcatgcctgggcaactcctggaattaaagggggagcgtggttctgctggccgtccatttccatttcaggagttcccctgtaaaacacgcggctggccatgcgcagcgccgggtttcatgttttttctttaccgggcggccagatagcccaggccaatggcaaggagccccccgacaaagctgatgagagtgtaaaggaagaaggcggagaagttcccttccttcaacaacaggaaggattcattcatcagcgtggaaaaggtggtgaaaccgccgcacaggcctgcggtaagaaagagccgcgtttccgtatgcaccaggctccggtcgaacaaaccgtagaggaagcccaggataaaacatcccagcaggttgactgccgccgtaccccaggggaacgaacttgccgaagtgacctggacgaaccgggccagcaggaaacgcaatacaccgcccgcaaagcttcccaggcccactatcatcagcattttcatcatatagcggctttttctatgttttaatggggaataaagtttcggagcagctgccgaaatccgccgggaaagactggctacggcttcttgtccatgaaagggttgctggctgcgttcccgaaaactggtttggaaacgttcgtgtcgcctggtgaagccctttaaccggaaacaagacttctgcggaagctgccggcctgtatgccggcagaacccatttcctttaacgcgtgcggataaaataccctgttttttccatatcgccagcctttttgttcttgattgcagggtaaaaccgtatttccttttttccatgtccctgccccttctcgttaccggaaccatcggaattgataccatccttactcccggcggcagggcggacggcgttctgggcggttccgtttcctttgcggccgtggccgcccttttgtttgccgaccgcgtggatgccgtcagcatcatcggggaggattttcccgcccattatgaagcggcccttgaggccaaagggttgtgcatgaaaggagtagaacgcaagaaggggccttcttttgcctggaccggggaatattttgacaatatgaacaagcggaggaccgtttgtgccaatgatgccgtgatgctggaatggaatgtgcacgttccggagcctttgaggaaccatccggtgctggtttgctgctgcatggttccggcccagcagcttaagtgcatggaacaatgcccggacgcggcgctggtactttccgattccatggacaagtggctgcgccgccagccggaattgctggatgccgtgatcagccgttcccatatcaccatgatgaatgaggatgaggcgaaggaatatgcccaggcgtccaccgtcatggaagccggggaattcctgctttccaaaggcgccgcatacgcagtggtgaaacagggggaatacggggccactcttctgggacgggatgccggcgggaatctccggattttccgttgtcccgcctatcccctgaaaactttggtggatccaaccggcgcgggggatacgttcctgggggctctggccggctatttgtccaccctgcctcccggccttccttcgtttgaggaagtgaagagggggattgtgtacgggacggtggcggcctccttcacctgcgagtccttttcggcagacgcccttctttccatgacaaaagagacctttcgccgccgtcttgaagagtatgcggagatgtgccgcctgccagacatccggctctcttccgcaagtgcctgttaagacggaatcagacctcctgaaaaagaggggatgccgcctttgatggttcgttttccggtttccgtttatgcggactgtccggaatttttcaggtgaaaaaggcccggacgcggaacatggaaaaccccggcgtggcttgcacggccggggtttccgtaaaaacaggggatgcagtcggcgggatcaagcatcctgaaggccgaatttaagctcggcttccgaaaccacctggccgttcaccaggcagcgtgccgtcgcctggccgatgtttccgcgcatcttggtcagttccgcttcaatgatgagcgtatcgccgggaaccacgacgcggcggaatttaaccttgtccgcactcatgaagtagccgagcttgctggcattgccgggctggcgcagcatgacgatggaggctacctgggccatggcttccacctggagaacgcccggcatgaccggatgtcccgggaagtggccctggaaaaagagttcattcatggtcaggttcttcaatccccggcacttggtttctccttcaaaaccgataatgcggtccaccatcaggaagggatagcggtgcggcagaaggctcatcacttcgttgatgtccagcacggcgtctccgtacggaacattgacgggattgggagccatctgctggttgcggtggtgttcctttttgagcttggccgtaagttcggtgttcgggccgtggcccggcttgatggcgatgacgtggcccaggatgggtttgccgcacagggtcaggtctccaataaggtccatggccttgtggcgggcaaattcattgatgaaacgcatgggctccttgctcatgagctcctcgccgcggatgaccacggcgttttccaggctgccgcccttgatgaggcccttttccagcaggggcttgatgtcttcgtagaacgtaaaggtgcgggccggggccagttccttttcatacgtttccggcgtgataaccgagtcaaagtactgggtaatgcggttttccggccccacgcaggtgacggaaacgcggaattgcttggaggggagaatagtcaggatggaaccgcctttggtttcaatggtaacggcctcgcgcacttccagatagcggcgcggcacatccagttccacgatgccggcgctcttgatcagttctacgtagggggctgaggacccgtccccgatgggcggttcattggcgtccatttcaatgacggcgttgtcaatgcccatgcccgtgagggcagagagaatatgttccacggtatgcactttgacggaaccttcagccaggctggtggcgcgttccacagtctgcaccttttccacgtccgcgctgatgaaaggctggtccggaatgtccacccggcggaatttaatgccgaagtcggcaggagccggtttcagggtcagggtaacgggctgtcccgtatgcaaagaggtaccggccagggaggccggagagccgacagttctttggtttccacatgccatgcggggatgctagtgaatgagcttccgtttggaaagcacgaaatcacggattttcctttaaattcggggaagaggcggcattccggcgtgtcatcccggaaagaagaggataaaggg
